(19) United States
(12) Patent Application Publication
(10) Pub. No.: US 2023/0174646 A1
(43) Pub. Date: Jun. 8, 2023

(54) Compositions and Methods For Blood-Brain Barrier Delivery

(71) Applicant: Aliada Therapeutics, Inc., Boston, MA (US)

(72) Inventors: Suzanne Edavettal, San Diego, CA (US); Sanjaya Singh, Spring House, PA (US); Derrick Domingo, San Diego, CA (US); Deepti Wilkinson, Del Mar, CA (US); Pilar Cejudo-Martin, San Diego, CA (US); Pharavee Jaiprasart, Spring House, PA (US); Brian Geist, Spring House, PA (US)

(21) Appl. No.: 17/995,768

(22) PCT Filed: Apr. 7, 2021
(86) PCT No.: PCT/IB2021/052889

§ 371 Date: Oct. 7, 2022

Related U.S. Application Data
(60) Provisional application No. 63/006,998, filed on Apr. 8, 2020.
(60) Provisional application No. 63/036,020, filed on Jun. 8, 2020.

(51) Int. Cl. C07K 16/28; A61K 47/68; A61K 39/395; C12N 15/62; C12N 15/63; A61K 9/00

(52) U.S. Cl. CPC C07K 16/28; A61K 47/6849; A61K 39/39533; C12N 15/62; C12N 15/63; A61K 9/0019; C07K 2317/31; C07K 2317/622; C07K 2317/92; C12N 2320/32

(57) ABSTRACT

Monoclonal anti-TfR antibodies and antigen-binding fragments thereof for delivering an agent to the brain of a subject in need thereof are described. Also described are conjugates and fusion constructs containing the anti-TfR antibody or antigen-binding fragment thereof coupled to a therapeutic or diagnostic agent, such as a second antibody and antigen-binding fragment thereof, for treating or detecting a neurological disorder and/or delivering a therapeutic or diagnostic agent across the blood-brain barrier. Also described are nucleic acids encoding the antibodies, conjugates and fusion constructs and related recombinant host cells.

### CROSS REFERENCE TO RELATED APPLICATION

[0001] This application claims priority to U.S. Provisional Application No. 63/006,998, filed on Apr. 8, 2020, and U.S. Provisional Application No. 63/036,020, filed on Jun. 8, 2020, the disclosures of which are incorporated herein by reference in their entireties.

### REFERENCE TO SEQUENCE LISTING SUBMITTED ELECTRONICALLY

[0002] This application contains a sequence listing, which is submitted electronically via EFS-Web as an ASCII formatted sequence listing with a file name “004852.158WO1-Sequence_Listing” and a creation date of Mar. 30, 2021, and having a size of 1.3 MB. The sequence listing submitted via EFS-Web is part of the specification and is herein incorporated by reference in its entirety.

### FIELD OF THE INVENTION

[0003] The present invention relates to a blood-brain barrier shuttle that binds to the transferrin receptor (TfR) and methods of using the same.

### BACKGROUND OF THE INVENTION

[0004] While the blood-brain barrier (BBB) prevents harmful substances from entering the brain and is essential for brain homeostasis, it presents a formidable obstacle for efficiently delivering drugs to the brain. Large molecules, such as monoclonal antibodies and other biotherapeutics, have great therapeutic/diagnostic potential for treating/detecting pathology in the central nervous system (CNS). However, their route into the brain is prevented by the BBB. Previous studies have illustrated that only a very small percentage (approximately 0.1%) of an IgG injected in the bloodstream are able to penetrate the BBB into the CNS compartment (Felgenhauer, Klin. Wschr. 52: 1158-1164, 1974)). This will limit any pharmacological effect due to the low concentration within the CNS of the antibody.

[0005] Numerous approaches have been studied to improve the brain delivery of therapeutic monoclonal antibodies (mAbs), including the use of receptor-mediated transcytosis (RMT). RMT utilizes abundantly expressed receptors on the luminal side of the BBB for transport through brain endothelial cells. Previous efforts to generate a clinically feasible platform for delivery of therapeutic mAbs into the brain have been focused on antibody engineering to increase the efficiency of transcytosis, with gains made through observations on valency of binding, pH dependency and affinity (reviewed in Goulatis et al., 2017, Curr Opin Struct Biol 45: 109-115). However, translation into NHPs and the clinic has been limited by rapid peripheral clearance from target-mediated drug disposition (TMDD) and safety from acute reticulocyte depletion (Gadkar, 2016, Eur J Pharm Biopharm. 2016 April; 101:53-61). Transferrin receptor (TfR), particularly TfR1, mediates the transport of iron-loaded transferrin (Tf) from blood to brain and the return of iron-depleted Tf to the blood (Kawabata, Free Radical Biology & Medicine, 133, 46-54, 2019). Anti-TfR1 monoclonal antibodies have been used to deliver drugs to the brain (Burkhart, et al. Progress in neurobiology, 181, 101665, 2019). However, safety liabilities and poor pharmacokinetics (PK) of anti-TfR1 monoclonal antibodies have hampered their clinical development as BBB carriers.

[0006] Therefore, there is a need for an anti-TfR monoclonal antibody or antigen binding fragment thereof that can be used to shuttle drugs into the brain efficiently with improved safety and PK.

### SUMMARY OF THE INVENTION

[0007] The application relates to an optimized platform for brain delivery, accounting for not just brain concentration of a delivered agent, such as a therapeutic monoclonal antibody (mAb), but also therapeutically relevant characteristics of the mAb, including peripheral pharmacokinetics, safety and the pharmacodynamics of the mAb. The platform utilizes a TfR binding molecule, in particular, an antibody or antigen-binding fragment thereof that binds to transferrin receptor (TfR), preferably a human transferrin receptor 1 (huTfR1), wherein the TfR binding molecule has optimized transport function defined by the on-rate kₐ and off-rate k_{d} values both at a neutral pH of 6.8 to 7.8, such as a physiological pH (e.g., 7.4), and at an acidic pH of 4.5 to 6.5, such as an acidic pH often found in endosomal compartments.

[0008] The inventors discovered, unexpectedly, the optimal values are not simply the fastest on-rate kₐ values and the slowest off-rate k_{d} values as one might expect in typical antibody-target interactions. That is, for this system, one would not necessarily want to use a molecule that “binds” and associates with TfR at a relatively high rate and then dissociates from the TfR more slowly to have the longest life span of the antibody-target complex. Instead, in one embodiment, the optimized transport function of the TfR binders described herein preferably have kₐ rates that are similar (e.g., within the same order of magnitude) at both physiologic pH (e.g., 7.4) and at lower pH (e.g., 6.5 or 6.0) but have faster off-rate k_{d} at a lower pH (e.g., pH 6.5 or 6.0) when compared to the k_{d} rates at physiological pH (e.g., 7.4).

[0009] In one general aspect, the application describes an anti-TfR antibody or antigen-binding fragment thereof for delivering a therapeutic or diagnostic agent to the brain of a subject in need thereof, wherein the anti-TfR antibody or antigen-binding fragment thereof binds to a transferrin receptor (TfR), preferably human TfR1, with a dissociation constant K_{D} of at least 1 nM, preferably 1 nM to 500 nM, at neutral pH and an off-rate constant k_{d} of at least 10⁻⁴ sec⁻¹, preferably 10⁻⁴ to 10⁻¹ sec⁻¹, at an acidic pH, preferably pH 5.

[0010] In some embodiments, the anti-TfR antibody or antigen-binding fragment thereof of claim 1 has an off-rate constant k_{d} of 2×10⁻² to 2×10⁻⁴ sec⁻¹, preferably 2.0×10⁻³ sec⁻¹ at a neutral pH.

[0011] In another embodiment, the optimized transport function of certain TfR binders described herein preferably have a kₐ rate of at least 1.05×10⁵ and a k_{d} rate of at least 2.0×10⁻³ s⁻¹ or faster at physiologic acidic pH (e.g., 7.4). The aforementioned pH, K_{D}, kₐ and k_{d} parameters reflect optimized transcytosis conditions only and in no way limit our findings that TfR-mediated transport, of certain molecules conjugated to certain TfR binders herein, may nonetheless occur outside of the preferred parameters described.

[0012] In one general aspect, the application relates to an antibody or antigen-binding fragment thereof for delivering an agent to the brain of a subject in need thereof, wherein the antibody or antigen-binding fragment thereof binds to transferrin receptor (TfR), preferably a human transferrin receptor 1 (huTfR1), comprising
[0013] (1) a heavy chain variable region comprising heavy chain complementarity determining regions (HCDRs) HCDR1, HCDR2 and HCDR3, and a light chain variable region comprising light chain complementarity determining regions (LCDRs) LCDR1, LCDR2 and LCDR3, wherein the HCDR1, HCDR2, HCDR3, LCDR1, LCDR2 and LCDR3 have the amino acid sequences of:
   [0014] (i) SEQ ID NOs: 292, 293, 294, 295, 296, and 297, respectively;
   [0015] (ii) SEQ ID NOs: 279, 280, 281, 282, 283 and 284, respectively;
   [0016] (iii) SEQ ID NOs: 29, 30, 31, 32, 33 and 34, respectively;
   [0017] (iv) SEQ ID NOs: 57, 58, 59, 60, 61 and 62, respectively;
   [0018] (v) SEQ ID NOs: 85, 86, 87, 88, 89 and 90, respectively;
   [0019] (vi) SEQ ID NOs: 110, 111, 112, 113, 114 and 115, respectively;
   [0020] (vii) SEQ ID NOs: 135, 136, 137, 138, 139 and 140, respectively;
   [0021] (viii) SEQ ID NOs: 191, 192, 193, 194, 195 and 196, respectively;
   [0022] (ix) SEQ ID NOs: 244, 245, 246, 247, 248 and 249, respectively;
   [0023] (x) SEQ ID NOs: 263, 264, 265, 266, 267 and 268, respectively;
   [0024] (xi) SEQ ID NOs: 345, 346, 347, 348, 349 and 350, respectively;
   [0025] (xii) SEQ ID NOs: 355, 356, 357, 358, 359 and 360, respectively;
   [0026] (xiii) SEQ ID NOs: 365, 366, 367, 368, 369 and 370, respectively;
   [0027] (xiv) SEQ ID NOs: 375, 376, 377, 378, 379 and 380, respectively;
   [0028] (xv) SEQ ID NOs: 385, 386, 387, 388, 389 and 390, respectively;
   [0029] (xvi) SEQ ID NOs: 395, 396, 377, 398, 399 and 400, respectively;
   [0030] (xvii) SEQ ID NOs: 405, 406, 407, 408, 409 and 410, respectively;
   [0031] (xviii) SEQ ID NOs: 415, 416, 417, 418, 419 and 420, respectively;
   [0032] (xix) SEQ ID NOs: 425, 426, 427, 428, 429 and 430, respectively;
   [0033] (xx) SEQ ID NOs: 435, 436, 437, 438, 439 and 440, respectively;
   [0034] (xxi) SEQ ID NOs: 445, 446, 447, 448, 449 and 450, respectively;
   [0035] (xxii) SEQ ID NOs: 455, 456, 457, 458, 459 and 460, respectively;
   [0036] (xxiii) SEQ ID NOs: 465, 466, 467, 468, 469 and 470, respectively;
   [0037] (xxiv) SEQ ID NOs: 475, 476, 477, 478, 479 and 480, respectively;
   [0038] (xxv) SEQ ID NOs: 485, 486, 487, 488, 489 and 490, respectively;
   [0039] (xxvi) SEQ ID NOs: 495, 496, 497, 498, 499 and 500, respectively;
   [0040] (xxvii) SEQ ID NOs: 505, 506, 507, 508, 509 and 510, respectively;
   [0041] (xxviii) SEQ ID NOs: 515, 516, 517, 518, 519 and 520, respectively;
   [0042] (xxix) SEQ ID NOs: 525, 526, 527, 528, 529 and 530, respectively;
   [0043] (xxx) SEQ ID NOs: 535, 536, 537, 538, 539 and 540, respectively; or
   [0044] (xxxi) SEQ ID NOs: 545, 546, 547, 548, 549 and 550, respectively; or
[0045] (2) a single variable domain on a heavy chain (VHH) comprising heavy chain complementarity determining regions (HCDRs) HCDR1, HCDR2 and HCDR3 having the amino acid sequences of:
   [0046] (i) SEQ ID NOs: 7, 8 and 9, respectively;
   [0047] (ii) SEQ ID NOs: 317, 318 and 319, respectively;
   [0048] (iii) SEQ ID NOs: 324, 325 and 326, respectively;
   [0049] (iv) SEQ ID NOs: 331, 332 and 333, respectively; or
   [0050] (v) SEQ ID NOs: 338, 339 and 340, respectively.

[0051] In certain embodiments, the application relates to an anti-TfR VHH fragment comprising an amino acid sequence having at least 80%, such as at least 85%, 90%, 95% or 100%, sequence identity to SEQ ID NO: 6, 316, 323, 330, or 337.

[0052] In other embodiments, the application relates to an anti-TfR single-chain variable fragment (scFv) comprising a heavy chain variable region covalently linked to a light chain variable region via a linker, preferably, the linker has the amino acid sequence of SEQ ID NO: 314. More preferably, the scFv comprises an amino acid sequence having at least 80%, such as at least 85%, 90%, 95% or 100%, sequence identity to the amino acid sequences of SEQ ID NO: 278, 291, 28, 56, 84, 109, 134, 162, 190, 218, 243, 262, 344, 354, 364, 374, 384, 394, 404, 414, 424, 434, 444, 454, 464, 474, 484, 494, 504, 514, 524, 534 or 544.

[0053] Another aspect of the application relates to a conjugate comprising an anti-TfR antibody or antigen-binding fragment thereof of the application coupled to a therapeutic or diagnostic agent, such as a neurological disorder drug or an agent for detecting a neurological disorder. Preferably, the therapeutic or diagnostic agent is a second antibody or an antigen binding fragment thereof that binds to a brain target.

[0054] In certain embodiments, the application relates to a fusion construct comprising an anti-TfR antibody or antigen-binding fragment thereof of the application covalently linked to a second antibody or an antigen binding fragment thereof that binds to a brain target, such as a brain target selected from the group consisting of beta-secretase 1 (BACE1), amyloid beta (Abeta), epidermal growth factor receptor (EGFR), human epidermal growth factor receptor 2 (HER2), Tau, apolipoprotein E4 (ApoE4), alpha-synuclein, CD20, huntingtin, prion protein (PrP), leucine rich repeat kinase 2 (LRRK2), parkin, presenilin 1, presenilin 2, gamma secretase, death receptor 6 (DR6), amyloid precursor protein (APP), p75 neurotrophin receptor (p75NTR), and caspase 6.

[0055] In certain embodiments, a fusion construct of the application comprises a second antibody or antigen binding fragment thereof that binds to Tau and comprises HCDR1, HCDR2, HCDR3, LCDR1, LCDR2 and LCDR3 having the amino acid sequences of SEQ ID NOs: 554 to 559, respectively. Preferably, the second antibody is a monoclonal antibody comprising a heavy chain having the amino acid sequence of SEQ ID NO: 310 and a light chain having the amino acid sequence of SEQ ID NO: 311.

[0056] In one embodiment, a fusion construct of the application comprises an anti-TfR antibody or antigen-binding fragment thereof, preferably an anti-huTfR1 VHH or scFv fragment, of the application covalently linked, via a linker, to the carboxyl terminus of only one of the two heavy chains of a second antibody or antigen binding fragment thereof that binds to a brain target. Preferably, the linker has the amino acid sequence of SEQ ID NO: 312 or SEQ ID NO: 313.

[0057] In certain embodiments, each of the two heavy chains of the second antibody or antigen binding fragment thereof comprises a modified constant heavy chain 3 (CH3) domain as compared to a wild-type CH3 domain to facilitate the formation of a heterodimer between the two heavy chains. Any mutation that facilitates the formation of a heterodimer between the two heavy chains can be used. Preferably, the modified CH3 domain of the first heavy chain comprises amino acid modifications at positions T350, L351, F405, and Y407, and the modified CH3 domain of the second heavy chain comprises amino acid modifications at positions T350, T366, K392 and T394. Preferably, the amino acid modification at position T350 is T350V, T350I, T350L or T350M; the amino acid modification at position L351 is L351Y; the amino acid modification at position F405 is F405A, F405V, F405T or F405S; the amino acid modification at position Y407 is Y407V, Y407A or Y407I; the amino acid modification at position T366 is T366L, T366I, T366V or T366M, the amino acid modification at position K392 is K392F, K392L or K392M, and the amino acid modification at position T394 is T394W. More preferably, the modified heterodimeric CH3 domain of the first heavy chain comprises mutations T350V, L351Y, F405A and Y407V, and the modified heterodimeric CH3 domain of the second heavy chain comprises mutations T350V, T366L, K392L and T394W. The numbering of amino acid residues in the antibody throughout the specification is performed according to the EU index as described in Kabat et al., Sequences of Proteins of Immunological Interest, 5th Ed. Public Health Service, National Institutes of Health, Bethesda, Md. (1991), unless otherwise explicitly stated.

[0058] In certain embodiments, the fragment crystallizable region (Fc region) of the second antibody or antigen binding fragment thereof contains substitutions that alter (increase or diminish), preferably eliminate, effector function, such as antibody dependent cellular cytotoxicity (ADCC) and/or complement dependent cytotoxicity (CDC). Preferably, the Fc region of the second antibody or antigen binding fragment thereof comprises one or more amino acid modifications that decrease or abolish the binding of the second antibody or antigen binding fragment thereof to Fc gamma receptors (FcγR) and avoid effector function mediated toxicity. For example, the Fc region of the second antibody or antigen binding fragment thereof can comprise one or more amino acid modifications at positions L234, L235, D270, N297, E318, K320, K322, P331, and P329, such as one, two or three mutations of L234A, L235A and P331S, wherein the numbering of amino acid residues is according to the EU index as set forth in Kabat.

[0059] In certain embodiments, the Fc region of the second antibody or antigen binding fragment thereof contains substitutions that alter (increase or diminish), preferably increase, the binding of the second antibody or antigen binding fragment thereof to neonatal Fc receptor (FcRn). Preferably the one or more mutations enhance the binding at an acidic pH, more preferably the Fc has the M252Y/S254T/T256E (YTE) mutations, wherein the numbering of amino acid residues is according to the EU index as set forth in Kabat.

[0060] In certain embodiments, a fusion construct of the application comprises:
[0061] (1) a first heavy chain having an amino acid sequence that is at least 80%, such as at least 85%, 90%, 95% or 100%, identical to an amino acid sequence selected from the group consisting of SEQ ID NOs: 301, 304, 307, 285, 288, 298, 10, 13, 16, 19, 22, 25, 35, 38, 41, 44, 47, 50, 53, 63, 66, 69, 72, 75, 78, 81, 91, 94, 97, 100, 103, 106, 116,119, 122, 125, 128, 131, 141, 144, 147,150, 153, 156, 159, 169,172, 175, 178, 181, 184, 187, 197, 200, 203, 206, 209, 212, 215, 225, 228, 231, 234, 237, 240, 250, 252, 256, 259, 269, 272, 275, 320, 327, 334, 341, 351, 361, 371, 381, 391, 401,411, 421, 431, 441, 451, 461 and 471;
[0062] (2) two light chains each independently having an amino acid sequence that is at least 80%, such as at least 85%, 90%, 95% or 100%, identical to an amino acid sequence selected from the group consisting of 302, 305, 308, 286, 289, 299, 11, 14, 17, 20, 23, 26, 36, 39, 42, 45, 48, 51, 54, 64, 67, 70, 73, 76, 79, 82, 92, 95, 98, 101, 104, 107, 117,120, 123, 126, 129, 132, 142, 145, 148, 151, 154, 157, 160, 170, 173, 176, 179, 182, 185, 188, 198, 201, 204, 207, 210, 213, 216, 226, 229, 232, 235, 238, 241, 251, 253, 257, 260, 270, 273 276, 321, 328, 335, 342, 352, 362, 372, 382, 392, 402, 412, 422, 432, 442, 452, 462 and 472, respectively; and
[0063] (3) a second heavy chain having an amino acid sequence that is at least 80%, such as at least 85%, 90%, 95% or 100%, identical to an amino acid sequence selected from the group consisting of 303, 306, 309, 287, 290, 300, 12, 15, 18, 21, 24, 27, 37, 40, 43, 46, 49, 52, 55, 65, 68, 71, 74, 77, 80, 83, 93, 96, 99, 102, 105, 108, 118, 121, 124, 127, 130, 133, 143, 146, 149, 152, 155, 158, 161, 171, 174, 177, 180, 183, 186, 189, 199, 202, 205, 208, 211, 214, 217, 227, 230, 233, 236, 239, 242, 252, 254, 258, 261, 271, 274, 277, 322, 329, 336, 343, 353, 363, 373, 383, 393, 403, 413, 423, 433, 443, 453, 463 and 473, respectively.

[0064] Another general aspect of the application relates to an isolated nucleic acid encoding the antibody or antigen-binding fragment, a conjugate, or a fusion construct of the application. Also provided is a vector comprising the isolated nucleic acid of the application, a host cell comprising the nucleic acid or the vector of the application.

[0065] Another general aspect of the application relates to a method of producing the antibody or antigen-binding fragment, a conjugate, or a fusion construct of the application. The method comprises culturing a cell comprising a nucleic acid of the application under conditions to produce the antibody or antigen-binding fragment, the conjugate or the fusion construct, and recovering the antibody or antigen-binding fragment, the conjugate or the fusion construct from the cell or cell culture.

[0066] Further provided is a pharmaceutical composition comprising a conjugate or a fusion construct of the application and a pharmaceutically acceptable carrier.

[0067] Another general aspect of the application relates to a method of treating or detecting a neurological disorder in a subject in need thereof, comprising administering to the subject an effective amount of an anti-TfR antibody or antigen binding fragment thereof, a conjugate or a fusion construct, or a pharmaceutical composition of the application. Preferably, the neurological disorder is selected from the group consisting of neurodegenerative diseases (such as Lewy body disease, postpoliomyelitis syndrome, Shy-Draeger syndrome, olivopontocerebellar atrophy, Parkinson's disease, multiple system atrophy, striatonigral degeneration, spinocerebellar ataxia, spinal muscular atrophy), tauopathies (such as Alzheimer disease and supranuclear palsy), prion diseases (such as bovine spongiform encephalopathy, scrapie, Creutz-feldt-Jakob syndrome, kuru, Gerstmann-Straussler-Scheinker disease, chronic wasting disease, and fatal familial insomnia), bulbar palsy, motor neuron disease, and nervous system heterodegenerative disorders (such as Canavan disease, Huntington's disease, neuronal ceroid-lipofuscinosis, Alexander's disease, Tourette's syndrome, Menkes kinky hair syndrome, Cockayne syndrome, Halervorden-Spatz syndrome, lafora disease, Rett syndrome, hepatolenticular degeneration, Lesch-Nyhan syndrome, and Unverricht-Lundborg syndrome), dementia (such as Pick's disease, and spinocerebellar ataxia), and cancer of the CNS and/or brain (such as brain metastases resulting from cancer elsewhere in the body).

[0068] Preferably, the antibody or antigen binding fragment thereof, the conjugate, the fusion construct or the pharmaceutical composition of the application is administered intravenously.

[0069] Also described is a method of delivering a therapeutic or diagnostic agent to the brain of a subject in need thereof, comprising administering to the subject a conjugate comprising the therapeutic or diagnostic agent coupled to an anti-TfR antibody or antigen-binding fragment thereof of the application. Preferably, the therapeutic or diagnostic agent is a second antibody or an antigen binding fragment thereof that binds to a brain target. More preferably, the administration of the therapeutic or diagnostic agent coupled to an anti-TfR antibody or antigen-binding fragment thereof of the application to the brain of a subject results in reduced Fc-mediated effector function and/or does not induce rapid reticulocyte depletion, as compared to the administration of the therapeutic or diagnostic agent not coupled to the anti-TfR antibody or antigen-binding fragment thereof.

[0070] Yet another general aspect of the invention relates to a method of inducing antibody dependent phagocytosis (ADP) without stimulating secretion of a pro-inflammatory cytokine in a subject in need thereof, comprising administering to the subject a complex comprising a therapeutic antibody or antigen binding fragment thereof coupled to, preferably covalently conjugated to, an antigen-binding fragment thereof according to an embodiment of the invention, wherein the therapeutic antibody or antigen binding fragment thereof does not have effector function, for example, the therapeutic antibody or antigen binding fragment thereof comprises one or more amino acid modifications at positions L234, L235, D270, N297, E318, K320, K322, P331, and P329, such as one, two or three mutations of L234A, L235A and P331S, wherein the numbering of amino acid residues is according to the EU index as set forth in Kabat. Preferably, the therapeutic antibody or antigen binding fragment thereof binds specifically to tau aggregates.

[0071] Other aspects, features and advantages of the invention will be apparent from the following disclosure, including the detailed description of the invention and its preferred embodiments and the appended claims.

### BRIEF DESCRIPTION OF THE FIGURES

[0072] The foregoing summary, as well as the following detailed description of the invention, will be better understood when read in conjunction with the appended drawings. For the purpose of illustrating the invention, there are shown in the drawings embodiments which are presently preferred. It should be understood, however, that the invention is not limited to the precise embodiments shown in the drawings.

[0073] The patent or application file contains at least one drawing executed in color. Copies of this patent or patent application publication with color drawing(s) will be provided by the Office upon request and payment of the necessary fee.

[0074] FIG. 1 is an illustration of tripod mAb format (also referred to as a TTP mAb) used for the brain delivery platform.

[0075] FIG. 2 is an image showing internalization of tripod mAbs in human brain endothelial cells. Tripod mAbs are stained red, nucleus is blue, and actin green.

[0076] FIG. 3 is a graph showing pH dependent binding, which was assessed by comparing off-rates at pH 7.4 to off-rate as pH was reduced to 6.5 and 6.0. Tripod mAbs were scored positive if the off-rate was faster as the pH decreased.

[0077] FIG. 4 is an image showing internalization of the tripod mAb BBBB383, in human brain endothelial cells. Tripod mAbs are stained red, nucleus is blue, and actin green.

[0078] FIG. 5A-FIG. 5B are graphs showing plasma (FIG. 5A) and brain (FIG. 5B) PK of BBBB383 and BBBB426. Brain shuttle containing anti-BACE mAbs, BBBB383 and BBBB426 were compared with BBBB456 (anti-BACE mAb without the brain shuttle). Symbols represent the average of 4 mice (at 4 and 24 hours) or 5 mice (at 72 hours).

[0079] FIG. 6 is a graph showing Ap1-40 concentrations in brain following treatment with BBBB383 and BBBB426. Brain shuttle containing anti-BACE mAbs, BBBB383 and BBBB426, were compared with BBBB456 (anti-BACE mAb without the brain shuttle). Symbols represent the average of 4 mice (at 4 and 24 hours) or 5 mice (at 72 hours).

[0080] FIG. 7A-FIG. 7B are graphs showing plasma (FIG. 7A) and brain (FIG. 7B) PK of brain shuttle anti-BACE mAbs. Brain shuttle containing anti-BACE mAbs were compared with BBBB456 (anti-BACE mAb without the brain shuttle, solid diamond with dotted line). Each symbol represents the average of two mice per timepoint.

[0081] FIG. 8 is a graph showing API-40 concentrations in brain following treatment with brain shuttle mAbs. Brain shuttle containing anti-BACE mAbs, were compared with BBBB456 (anti-BACE mAb without the brain shuttle, solid diamond with dotted line). Dose dependent decrease in AB levels was observed for all brain shuttles except BBBB983. Each symbol represents the average of two mice per timepoint.

[0082] FIG. 9 is an image showing internalization of tripod mAb BBB-00489 in human brain endothelial cells. Tripod mAbs are stained red and actin green.

[0083] FIG. 10 are graphs showing brain pharmacokinetics in cynomolgus monkey. Cynomolgus monkeys were dosed 10 mg/kg intravenously with three TTP mAbs, BBBB1134 and BBBB1136 (left) and BBBB1133 (right), and compared to control mAb, PT1B844. Brain exposure measured 72 hours following dosing (n=3 cynomolgus monkeys/mAb). Brain concentration was determined for the mAbs across a variety of areas and averaged across animals. Each symbol represents a region of the brain.

[0084] FIG. 11 is a graph showing brain concentration of a brain shuttle-containing mAb as compared to the non-brain shuttle control in different regions. Individual points represent each animal (n=3).

[0085] FIG. 12 is a graph showing plasma concentration of mAbs dosed i.v. at 4, 24 and 72 hours. All brain shuttle mAbs had faster clearance than non-brain shuttle mAbs. Individual points represent each animal (n=3).

[0086] FIG. 13 is a graph showing reticulocyte depletion observed during the cyno study for BBBB1134 but not the other mAbs, confirming the impact of Fc function on TfR binding mAbs and reticulocyte depletion.

[0087] FIG. 14A-FIG. 14C: Brain pharmacokinetics and pharmacodynamics of tripod mAbs in huTfR knock-in mice, human TfR knock-in mice were dosed 10 mg/kg intravenously with a panel of tripod mAbs (BBBBx) compared with one control mAb, and brain exposure was assessed at 24 hours:
[0088] FIG. 14A: a range of enhanced exposure was observed from no enhancement (BBBB974, open square) to 10.5×(BBBB978, open triangle) (n=2 mice, symbols represent each individual animal with the bar representing the mean and error bars standard deviation).
[0089] FIG. 14B: the tripod mAb off-rates correlated well with brain exposure, with an off-rate that was neither too fast nor too slow observed to be optimal.
[0090] FIG. 14C: brain pharmacodynamics of the mAb, anti-BACE antagonist mAb, were assessed and a strong PK/PD relationship was observed in the brain for all tripod mAbs, except BBBB983. BBBB983 had enhanced brain exposure (5.5×) but similar concentration of Aβ₁₋₄₀ as the control mAb (each triangle represents an individual). It is hypothesized that the slow-neutral off-rate is preventing diffusion in the brain to the target.

[0091] FIG. 15 is a graph showing mAb mediated uptake into microglial phagosomes. All brain shuttle mAbs promoted more efficient uptake into phagosomes than the non-brain shuttle mAb, PT1B844. Within the brain shuttle mAbs those with full effector function (BBBB1131, 1134 and 1046) were more efficient than those without effector function.

[0092] FIG. 16 is a graph showing mAb mediated uptake into macrophage phagosomes. All brain shuttle mAbs promoted more efficient uptake into phagosomes than the non-brain shuttle mAb, B21M-IgG1.

[0093] FIG. 17A-FIG. 17F: Brain pharmacokinetics in cynomolgus monkey demonstrate enhanced brain delivery of therapeutic mAb.
[0094] FIG. 17A: cynomolgus monkeys were dosed 10 mg/kg intravenously with two tripod mAbs, BBBB1134 and BBBB1136, and one control mAb, PT1B844. Brain exposure measured 72 hours following dosing (n=3 cynomolgus monkeys/mAb. Symbols represent each individual animal with the bar representing the mean and error bars standard deviation). Enhanced brain exposure was observed for both brain shuttle mAbs across all regions of the brain assessed.
[0095] FIG. 17B: a 7× and 11× enhancement in brain concentration was observed for BBBB1134 and BBBB136, respectively, compared with the control mAb.
[0096] FIG. 17C: the plasma exposure over 72 hours demonstrated target-mediated drug disposition for the tripod mAbs with accelerated clearance observed compared with the control mAb. The tripod mAbs differ in their binding affinity for FcRn, with BBBB1136 containing the high binding affinity “YTE” mutations; BBBB1136 (triangle) had approximately 2×enhanced plasma concentration at 72 hours compared with BBBB1134 (open square).
[0097] FIG. 17D: in vitro ADCC activity of the tripod mAbs (BBBB1134 and BBBB1136) compared with the positive control, BBBB175 high affinity anti-TfR binding IgG1 mAb, and negative control, CNTO3930, an IgG1 mAb that does not bind the target cells. BBBB1134, IgG1 mAb, potentiates robust ADCC of target cells with both human and cyno PBMCs. BBBB1136, an effector function silent IgG1 mAb, was observed to have no ADCC activity.
[0098] FIG. 17E: SPR binding data of BBBB1134 and BBBB1136 for the complement component 1q (C1q). BBBB1134 binds C1q while BBBB1136 does not.
[0099] FIG. 17F: Reticulocyte depletion observed in the cynomolgus monkey PK study. Reticulocyte loss 2 days following dosing was not observed for the control mAb or BBBB1136, while robust depletion was observed following treatment with BBBB1134 (symbols represent the individual animals, bars the average and error bars the standard deviation).

[0100] FIG. 18A-FIG. 18D: Brain and Serum pharmacokinetics of repeat dosing and dose response of BBBB1133 in cynomolgus monkey:
[0101] FIG. 18A: Cynomolgus monkeys were dosed intravenously with either 2 mg/kg, 10 mg/kg or 30 mg/kg with BBBB1133 and brain exposure assessed at 1, 7 or 15 days following (n=3 monkeys/mAb and timepoint. Symbols represent the average brain concentration and error bars the standard deviation). Linear brain PK was observed between 2 and 10 mg/kg but nonlinear PK observed between 10 and 30 mg/kg, suggesting that 30 mg/kg is a saturating dose for the TfR
[0102] FIG. 18B: Serum concentration of BBBB1133 was measured throughout the study (1, 6 hours post-dosing and on days 1, 2, 4, 10 and 14). Linear pharmacokinetics was observed at all three doses. A T_{1/2}=6 days was determined for BBBB1133 in serum.
[0103] FIG. 18C: Cynomolgus monkeys were dosed intravenously weekly for three weeks with BBBB1133 at either 2 mg/kg, 10 mg/kg or 30 mg/kg. Brain exposure assessed at 1, 7, 15, or 21 days following dosing (n=3 monkeys/mAb and timepoint. Symbols represent the average brain concentration and error bars the standard deviation). Linear brain PK was observed between 2 and 10 mg/kg but nonlinear PK observed between 10 and 30 mg/kg, suggesting that 30 mg/kg is a saturating dose for the TfR. Evidence for accumulation was observed at the 30 mg/kg dose.
[0104] FIG. 18D: Serum concentration of BBBB1133 was measured throughout the study (1, 6 hours post first dose and on days 1, 2, 4, 10, 14, 14.02, 14.25, 15, 16, 18 and 21). Linear pharmacokinetics was observed at all three doses with no evidence for PK tolerance with repeat dosing.

[0105] FIG. 19A-FIG. 19C: Non-classical, non-FcγR mediated ADP promotes the efficient phagocytosis of Tau aggregates in human microglia:
[0106] FIG. 19A: To assess the potential of the effector function impaired IgG1 tripod mAbs, BBBB1133 and BBBB1136, to promote uptake of Tau aggregates in microglia, human iPSC derived microglia were incubated with mAbs and biotinylated phospho-tau oligomers labeled with streptavidin Alexa Flour 488 (AF488). At 4 hours post incubation, cells were washed, fixed, permeabilized, stained and imaged using confocal microscopy. Cells containing tau aggregates that co-localized with Lamp-1 stained lysosomes were quantitated. BBBB1133 and BBBB1136 promoted more efficient uptake and lysosomal trafficking than the anti-Tau WT IgG1 mAb, PTIB844.
[0107] FIG. 19B: Uptake of Tau oligomers can be blocked with excess of soluble TfR ECD but is not impacted by addition of soluble Fc, demonstrating the uptake occurs through TfR.
[0108] FIG. 19C: Human iPSc-derived microglia were incubated with Alexa Fluor 488-labeled phosphoTau peptide (green) in the presence of PT1B844 or BBBB1133 for 4 hours. After fixation, cells were stained with antibodies against Clathrin, EEA1, Rab17 or Lamp1, and detected with Alexa Fluor 647-secondary antibodies (red). Cells were imaged using a Perkin Elmer Opera Phenix, 60× magnification, confocal mode. Representative cell images at the 2 μm plane are shown. Scale bar=10 μm. Arrows point at the colocalization area detailed in insets. Third column for each phosphoTau-antibody treatment is the merged result of the other two columns. Cells were also stained and imaged with DAPI to detect nuclei and hcs Cellmask orange to detect cytoplasm (not shown).

[0109] FIG. 20A-FIG. 20E: Non-classical, non-FcγR mediated ADP promotes the efficient phagocytosis of Tau aggregate derived from human AD patient brains in human macrophages and microglia:
[0110] FIG. 20A: Human monocyte-derived macrophages were incubated with Tau aggregates and BBBB1133 (open square) and the control anti-Tau mAb, PT1B844 (circle). The amount of pTau remaining in the culture supernatant was quantified with time. Similar degradation of pTau was observed up 8 hours, at which point the PT1B844-mediated ADP stalls while the BBBB1133-mediated ADP continues to promote degradation.
[0111] FIG. 20B: A similar trend was observed using human iPSC-derived microglia, with BBBB1133 (open square) potentiating more robust degradation of pTau with time compared with PT1B844. The mechanism of BBBB1133-mediated pTau degradation was demonstrated to occur through the TfR by blocking degradation using excess amount of soluble TfR ECD.
[0112] FIG. 20C-FIG. 20E: Supernatants from the microglia experiment were assess for cytokine concentrations. PT1B844-mediated pTau ADP simulated the release of proinflammatory cytokines, TFNα (FIG. 20C), IL6 (FIG. 20D) and IL1β (FIG. 20E), while BBBB1133 did not simulate similar release.

[0113] FIG. 21: Co-injection of PHFs with the indicated tau antibodies reduced the induction of tau pathology:
[0114] FIG. 21A: Partial dependency of the model on Fc-dependent activity is demonstrated by the statistically significant differences in neutralization of Tau by the mouse IgG2a.
[0115] FIG. 21B: Both anti-Tau mAbs neutralized Tau seeding compared with the isotype control. No statistical difference was observed between the mAb and the TTP mAb, with the TTP mAb having slightly improved neutralization compared with the mAb, demonstrating that non-classical ADP mechanism is functional in vivo.

### DETAILED DESCRIPTION OF THE INVENTION

[0116] Various publications, articles and patents are cited or described in the background and throughout the specification; each of these references is herein incorporated by reference in its entirety. Discussion of documents, acts, materials, devices, articles or the like which has been included in the present specification is for the purpose of providing context for the present invention. Such discussion is not an admission that any or all of these matters form part of the prior art with respect to any inventions disclosed or claimed.

[0117] Unless defined otherwise, all technical and scientific terms used herein have the same meaning as commonly understood to one of ordinary skill in the art to which this invention pertains. Otherwise, certain terms used herein have the meanings as set in the specification. All patents, published patent applications, and publications cited herein are incorporated by reference as if set forth fully herein. It must be noted that as used herein and in the appended claims, the singular forms “a,” “an,” and “the” include plural reference unless the context clearly dictates otherwise.

[0118] Unless otherwise stated, any numerical value, such as a concentration or a concentration range described herein, are to be understood as being modified in all instances by the term “about.” Thus, a numerical value typically includes ±10% of the recited value. For example, a dosage of 10 mg includes 9 mg to 11 mg. As used herein, the use of a numerical range expressly includes all possible subranges, all individual numerical values within that range, including integers within such ranges and fractions of the values unless the context clearly indicates otherwise.

[0119] As used herein, the conjunctive term “and/or” between multiple recited elements is understood as encompassing both individual and combined options. For instance, where two elements are conjoined by “and/or,” a first option refers to the applicability of the first element without the second. A second option refers to the applicability of the second element without the first. A third option refers to the applicability of the first and second elements together. Any one of these options is understood to fall within the meaning, and therefore satisfy the requirement of the term “and/or” as used herein. Concurrent applicability of more than one of the options is also understood to fall within the meaning, and therefore satisfy the requirement of the term “and/or.”

[0120] Throughout this specification and the claims which follow, unless the context requires otherwise, the word “comprise,” and variations such as “comprises” and “comprising,” will be understood to imply the inclusion of a stated integer or step or group of integers or steps but not the exclusion of any other integer or step or group of integer or step. When used herein the term “comprising” can be substituted with the term “containing” or “including” or sometimes when used herein with the term “having.”

[0121] When used herein “consisting of” excludes any element, step, or ingredient not specified in the claim element. When used herein, “consisting essentially of” does not exclude materials or steps that do not materially affect the basic and novel characteristics of the claim. Any of the aforementioned terms of “comprising,” “containing,” “including,” and “having,” whenever used herein in the context of an aspect or embodiment of the invention can be replaced with the term “consisting of” or “consisting essentially of” to vary scopes of the disclosure.

[0122] The term “antibody” herein is used in the broadest sense and specifically includes full-length monoclonal antibodies, polyclonal antibodies, and, unless otherwise stated or contradicted by context, antigen-binding fragments, antibody variants, and multispecific molecules thereof, so long as they exhibit the desired biological activity. Generally, a full-length antibody is a glycoprotein comprising at least two heavy (H) chains and two light (L) chains inter-connected by disulfide bonds, or an antigen binding portion thereof. Each heavy chain is comprised of a heavy chain variable region (abbreviated herein as VH) and a heavy chain constant region. The heavy chain constant region is comprised of three domains, CH1, CH2 and CH3. Each light chain is comprised of a light chain variable region (abbreviated herein as VL) and a light chain constant region. The light chain constant region is comprised of one domain, CL. The VH and VL regions can be further subdivided into regions of hypervariability, termed complementarily determining regions (CDR), interspersed with regions that are more conserved, termed framework regions (FR). Each VH and VL is composed of three CDRs and four FRs, arranged from amino-terminus to carboxy-terminus in the following order: FR1, CDR1, FR2, CDR2, FR3, CDR3, FR4. The variable regions of the heavy and light chains contain a binding domain that interacts with an antigen. General principles of antibody molecule structure and various techniques relevant to the production of antibodies are provided in, e.g., Harlow and Lane, ANTIBODIES: A LABORATORY MANUAL, Cold Spring Harbor Laboratory Press, Cold Spring Harbor, N. Y., (1988).

[0123] Depending on the amino acid sequence of the constant domain of their heavy chains, full length antibodies can be assigned to different “classes”. There are five major classes of full-length antibodies: IgA, IgD, IgE, IgG, and IgM, and several of these may be further divided into “subclasses” (isotypes), e.g., IgG1, IgG2, IgG3, IgG4, IgA, and IgA2. The heavy-chain constant domains that correspond to the different classes of antibodies are called alpha, delta, epsilon, gamma, and mu, respectively. The subunit structures and three-dimensional configurations of different classes of immunoglobulins are well known.

[0124] An “antibody” can also be a single variable domain on a heavy chain (VHH) antibody, also referred to as a heavy chain only antibody (HcAb), which are devoid of light chains and can be naturally produced by camelids or sharks. The antigen binding portion of the HcAb is comprised of a VHH fragment.

[0125] The term “recombinant antibody”, as used herein, refers to an antibody (e.g. a chimeric, humanized, or human antibody or antigen-binding fragment thereof) that is expressed by a recombinant host cell comprising nucleic acid encoding the antibody. Examples of “host cells” for producing recombinant antibodies include: (1) mammalian cells, for example, Chinese Hamster Ovary (CHO), COS, myeloma cells (including YO and NSO cells), baby hamster kidney (BHK), Hela and Vero cells; (2) insect cells, for example, sf9, sf21 and Tn5; (3) plant cells, for example plants belonging to the genus Nicotiana (e.g. Nicotiana tabacum); (4) yeast cells, for example, those belonging to the genus Saccharomyces (e.g. Saccharomyces cerevisiae) or the genus Aspergillus (e.g. Aspergillus niger); (5) bacterial cells, for example Escherichia, coli cells or Bacillus subtilis cells, etc.

[0126] An “antigen-binding fragment” of an antibody is a molecule that comprises a portion of a full-length antibody which is capable of detectably binding to the antigen, typically comprising one or more portions of at least the VH region. Antigen-binding fragments include multivalent molecules comprising one, two, three, or more antigen-binding portions of an antibody, and single-chain constructs wherein the VL and VH regions, or selected portions thereof, are joined by synthetic linkers or by recombinant methods to form a functional, antigen-binding molecule. Antigen-binding fragments can also be a single-domain antibody (sdAb), also known as a nanobody, which is an antibody fragment consisting of a single monomeric variable antibody domain (VHH). While some antigen-binding fragments of an antibody can be obtained by actual fragmentation of a larger antibody molecule (e.g., enzymatic cleavage), most are typically produced by recombinant techniques. The antibodies of the invention can be prepared as full-length antibodies or antigen-binding fragments thereof. Examples of antigen-binding fragments include Fab, Fab′, F(ab)₂, F(ab′)₂, F(ab)₃, Fv (typically the VL and VH domains of a single arm of an antibody), single-chain Fv (scFv, see e.g., Bird et al., Science 1988; 242:423-426; and Huston et al. PNAS 1988; 85:5879-5883), dsFv, Fd (typically the VH and CH1 domain), and dAb (typically a VH domain) fragments; VH, VL, VHH, and V-NAR domains; monovalent molecules comprising a single VH and a single VL chain; minibodies, diabodies, triabodies, tetrabodies, and kappa bodies (see, e.g., Ill et al., Protein Eng 1997; 10:949-57); camel IgG; IgNAR; as well as one or more isolated CDRs or a functional paratope, where the isolated CDRs or antigen-binding residues or polypeptides can be associated or linked together so as to form a functional antibody fragment. Various types of antibody fragments have been described or reviewed in, e.g., Holliger and Hudson, Nat Biotechnol 2005; 23:1126-1136; WO2005040219, and published U.S. Patent Applications 20050238646 and 20020161201. Antibody fragments can be obtained using conventional recombinant or protein engineering techniques, and the fragments can be screened for antigen-binding or other function in the same manner as are intact antibodies.

[0127] Various techniques have been developed for the production of antibody fragments. Traditionally, these fragments were derived via proteolytic digestion of full-length antibodies (see, e.g., Morimoto et al., Journal of Biochemical and Biophysical Methods, 24:107-117 (1992); and Brennan et al., Science, 229:81 (1985)). However, these fragments can now be produced directly by recombinant host cells. Alternatively, Fab′-SH fragments can be directly recovered from E. coli and chemically coupled to form F(ab′)₂ fragments (Carter et al., Bio/Technology, 10:163-167 (1992)). According to another approach, F(ab′)₂ fragments can be isolated directly from recombinant host cell culture. In other embodiments, the antibody of choice is a single-chain Fv fragment (scFv). See WO 1993/16185; U.S. Pat. Nos. 5,571,894; and 5,587,458. The antibody fragment may also be a “linear antibody”, e.g., as described in U.S. Pat. No. 5,641,870, for example. Such linear antibody fragments can be monospecific or bispecific.

[0128] The term “antibody derivative” as used herein refers to a molecule comprising a full-length antibody or an antigen-binding fragment thereof, wherein one or more amino acids are chemically modified or substituted. Chemical modifications that can be used in antibody derivative includes, e.g., alkylation, PEGylation, acylation, ester formation or amide formation or the like, e.g., for linking the antibody to a second molecule. Exemplary modifications include PEGylation (e.g., cysteine-PEGylation), biotinylation, radiolabeling, and conjugation with a second agent (such as a cytotoxic agent).

[0129] Antibodies herein include “amino acid sequence variants” with altered antigen-binding or biological activity. Examples of such amino acid alterations include antibodies with enhanced affinity for antigen (e.g. “affinity matured” antibodies), and antibodies with altered Fc region, if present, e.g. with altered (increased or diminished) antibody dependent cellular cytotoxicity (ADCC) and/or complement dependent cytotoxicity (CDC) (see, for example, WO 00/42072, Presta, L. and WO 99/51642, Iduosogie et al); and/or increased or diminished serum half-life (see, for example, WO00/42072, Presta, L.).

[0130] A “multispecific molecule” comprises an antibody, or an antigen-binding fragment thereof, which is associated with or linked to at least one other functional molecule (e.g. another peptide or protein such as another antibody or ligand for a receptor) thereby forming a molecule that binds to at least two different binding sites or target molecules. Exemplary multispecific molecules include bi-specific antibodies and antibodies linked to soluble receptor fragments or ligands.

[0131] The term “human antibody”, as used herein, is intended to include antibodies having variable regions in which both the framework and CDR regions are derived from (i.e., are identical or essentially identical to) human germline immunoglobulin sequences. Furthermore, if the antibody contains a constant region, the constant region also is “derived from” human germline immunoglobulin sequences. The human antibodies of the invention can include amino acid residues not encoded by human germline immunoglobulin sequences (e.g., mutations introduced by random or site-specific mutagenesis in vitro or by somatic mutation in viva). However, the term “human antibody”, as used herein, is not intended to include antibodies in which CDR sequences derived from the germline of another mammalian species, such as a mouse, have been grafted onto human framework sequences.

[0132] A “humanized” antibody is a human/non-human chimeric antibody that contains a minimal sequence derived from non-human immunoglobulin. For the most part, humanized antibodies are human immunoglobulins (recipient antibody) in which residues from a hypervariable region of the recipient are replaced by residues from a hypervariable region of a non-human species (donor antibody) such as mouse, rat, rabbit, or non-human primate having the desired specificity, affinity, and capacity. In some instances, FR residues of the human immunoglobulin are replaced by corresponding non-human residues. Furthermore, humanized antibodies can comprise residues that are not found in the recipient antibody or in the donor antibody. These modifications are made to further refine antibody performance. In general, a humanized antibody will comprise substantially all of at least one, and typically two, variable domains, in which all or substantially all of the hypervariable loops correspond to those of a non-human immunoglobulin and all or substantially all of the FR residues are those of a human immunoglobulin sequence. The humanized antibody can optionally also comprise at least a portion of an immunoglobulin constant region (Fc), typically that of a human immunoglobulin. For further details, see, e.g., Jones et al., Nature 321:522-525 (1986); Riechmann et al., Nature 332:323-329 (1988); and Presta, Curr. Op. Struct. Biol. 2:593-596 (1992), WO 92/02190, US Patent Application 20060073137, and U.S. Pat. Nos. 6,750,325, 6,632,927, 6,639,055, 6,548,640, 6,407,213, 6,180,370, 6,054,297, 5,929,212, 5,895,205, 5,886,152, 5,877,293, 5,869,619, 5,821,337, 5,821,123, 5,770,196, 5,777,085, 5,766,886, 5,714,350, 5,693,762, 5,693,761, 5,530,101, 5,585,089, and 5,225,539.

[0133] The term “hypervariable region” when used herein refers to the amino acid residues of an antibody that are responsible for antigen binding. The hypervariable region generally comprises amino acid residues from a “complementarity-determining region” or “CDR” (residues 24-34 (L1), 50-56 (L2) and 89-97 (L3) in the light-chain variable domain and 31-35 (H1), 50-65 (H2) and 95-102 (H3) in the heavy-chain variable domain; (Kabat et al. (1991) Sequences of Proteins of Immunological Interest, Fifth Edition, U.S. Department of Health and Human Services, NIH Publication No. 91-3242) and/or those residues from a “hypervariable loop” (residues 26-32 (L1), 50-52 (L2) and 91-96 (L3) in the light-chain variable domain and 26-32 (H1), 53-55 (H2) and 96-101 (H3) in the heavy-chain variable domain; Chothia and Lesk, J. Mol. Biol. 1987; 196:901-917). Typically, the numbering of amino acid residues in this region is performed by the method described in Kabat et al., supra. Phrases such as “Kabat position”, “variable domain residue numbering as in Kabat” and “according to Kabat” herein refer to this numbering system for heavy chain variable domains or light chain variable domains. Using the Kabat numbering system, the actual linear amino acid sequence of a peptide can contain fewer or additional amino acids corresponding to a shortening of, or insertion into, a FR or CDR of the variable domain. For example, a heavy chain variable domain can include a single amino acid insert (residue 52a according to Kabat) after residue 52 of CDR H2 and inserted residues (e.g. residues 82a, 82b, and 82c, etc. according to Kabat) after heavy chain FR residue 82. The Kabat numbering of residues can be determined for a given antibody by alignment at regions of homology of the sequence of the antibody with a “standard” Kabat numbered sequence.

[0134] “Framework region” or “FR” residues are those VH or VL residues other than the CDRs as herein defined.

[0135] An “epitope” or “binding site” is an area or region on an antigen to which an antigen-binding peptide (such as an antibody) specifically binds. A protein epitope can comprise amino acid residues directly involved in the binding (also called the immunodominant component of the epitope) and other amino acid residues, which are not directly involved in the binding, such as amino acid residues which are effectively blocked by the specifically antigen binding peptide (in other words, the amino acid residue is within the “solvent-excluded surface” and/or “footprint” of the specifically antigen binding peptide).

[0136] A “paratope” is an area or region of an antigen-binding portion of an antibody that specifically binds an antigen. Unless otherwise stated or clearly contradicted by context, a paratope can comprise amino acid residues directly involved in epitope binding, several of which are typically in CDRs, and other amino acid residues, which are not directly involved in the binding, such as amino acid residues which are effectively blocked by the specifically bound antigen (in other words, the amino acid residue is within the “solvent-excluded surface” and/or “footprint” of the specifically bound antigen).

[0137] An “antibody that binds to the same epitope” as a reference antibody refers to an antibody that blocks binding of the reference antibody to its antigen in a competition assay by 50% or more, and conversely, the reference antibody blocks binding of the antibody to its antigen in a competition assay by 50% or more.

[0138] An “isolated” antibody is one which has been separated from a component of its natural environment. In some embodiments, an antibody is purified to greater than 95% or 99% purity as determined by, for example, electrophoretic (e.g., SDS-PAGE, isoelectric focusing (IEF), capillary electrophoresis) or chromatographic (e.g., ion exchange or reverse phase HPLC). For a review of methods for assessment of antibody purity, see, e.g., Flatman et al, J. Chromatogr. B 848:79-87 (2007).

[0139] The term “administering” with respect to the methods of the invention, means a method for therapeutically or prophylactically preventing, treating or ameliorating a syndrome, disorder or disease as described herein by using a conjugate of the invention or a form, composition or medicament thereof. Such methods include administering an effective amount of said antibody, antigen-binding fragment thereof, or conjugate, or a form, composition or medicament thereof at different times during the course of a therapy or concurrently in a combination form. The methods of the invention are to be understood as embracing all known therapeutic treatment regimens.

[0140] The ability of a target antibody to “block” the binding of a target molecule to a natural target ligand, means that the antibody, in an assay using soluble or cell-surface associated target and ligand molecules, can detectably reduce the binding of a target molecule to the ligand in a dose-dependent fashion, where the target molecule detectably binds to the ligand in the absence of the antibody.

[0141] The “blood-brain barrier” or “BBB” refers a physiological barrier between the peripheral circulation and the brain and spinal cord which is formed by tight junctions within the brain capillary endothelial plasma membranes, creating a tight barrier that restricts the transport of molecules into the brain. The BBB can restrict the transport of even very small molecules such as urea (60 Daltons) into the brain. Examples of the BBB include the BBB within the brain, the blood-spinal cord barrier within the spinal cord, and the blood-retinal barrier within the retina, all of which are contiguous capillary barriers within the CNS. The BBB also encompasses the blood-CSF barrier (choroid plexus) where the barrier is comprised of ependymal cells rather than capillary endothelial cells.

[0142] A “blood-brain barrier receptor” (abbreviated “R/BBB” herein) is an extracellular membrane-linked receptor protein expressed on brain endothelial cells which is capable of transporting molecules across the BBB or be used to transport exogenous administrated molecules. Examples of R/BBB include, but are not limited to, transferrin receptor (TfR), insulin receptor, insulin-like growth factor receptor (IGF-R), low density lipoprotein receptors including without limitation low density lipoprotein receptor-related protein 1 (LRP1) and low density lipoprotein receptor-related protein 8 (LRP8), and heparin-binding epidermal growth factor-like growth factor (HB-EGF). An exemplary R/BBB herein is transferrin receptor (TfR).

[0143] The “central nervous system” or “CNS” refers to the complex of nerve tissues that control bodily function, and includes the brain and spinal cord.

[0144] A “conjugate” as used herein refer to a protein covalently linked to one or more heterologous molecule(s), including but not limited to a therapeutic peptide or protein, an antibody, a label, or a neurological disorder drug.

[0145] As used herein the term “coupled” refers to the joining or connection of two or more objects together. When referring to chemical or biological compounds, coupled can refer to a covalent connection between the two or more chemical or biological compounds. By way of a non-limiting example, an antibody of the invention can be coupled with a peptide of interest to form an antibody coupled peptide. An antibody coupled peptide can be formed through specific chemical reactions designed to conjugate the antibody to the peptide. In certain embodiments, an antibody of the invention can be covalently coupled with a peptide of the invention through a linker. The linker can, for example, be first covalently connected to the antibody or the peptide, then covalently connected to the peptide or the antibody.

[0146] An “effective amount” or “therapeutically effective amount” of an agent, e.g., a pharmaceutical formulation, refers to an amount effective, at dosages and for periods of time necessary, to achieve the desired therapeutic or prophylactic result.

[0147] A “linker” as used herein refers to a chemical linker or a single chain peptide linker that covalently connects two different entities. A linker can be used to connect any two of an antibody or a fragment thereof, a blood brain barrier shuttle, a fusion protein and a conjugate of the present invention. The linker can connect, for example, the VH and VL in scFv, or the monoclonal antibody or antigen-binding fragment thereof with a therapeutic molecule, such as a second antibody. In some embodiment, if the monovalent binding entity comprises a scFv directed to TfR, preferably huTfR1, and the therapeutic molecule comprises an antibody directed to a CNS target, such as Tau, then the linker can connect the scFv to the antibody directed to Tau. Single chain peptide linkers, comprised of from 1 to 25 amino acids, such as 1, 2, 3, 4, 5, 6, 7, 8, 9, 10, 11, 12, 13, 14, 15, 16, 17, 18, 19, 20, 21, 22, 23, 24, or 25 amino acids, joined by peptide bonds, can be used. In certain embodiments, the amino acids are selected from the twenty naturally occurring amino acids. In certain other embodiments, one or more of the amino acids are selected from glycine, alanine, proline, asparagine, glutamine and lysine. Chemical linkers, such as a hydrocarbon linker, a polyethylene glycol (PEG) linker, a polypropylene glycol (PPG) linker, a polysaccharide linker, a polyester linker, a hybrid linker consisting of PEG and an embedded heterocycle, and a hydrocarbon chain can also be used.

[0148] A “neurological disorder” as used herein refers to a disease or disorder which affects the CNS and/or which has an etiology in the CNS. Exemplary CNS diseases or disorders include, but are not limited to, neuropathy, amyloidosis, cancer, an ocular disease or disorder, viral or microbial infection, inflammation, ischemia, neurodegenerative disease, seizure, behavioral disorders, and a lysosomal storage disease. For the purposes of this application, the CNS will be understood to include the eye, which is normally sequestered from the rest of the body by the blood-retina barrier. Specific examples of neurological disorders include, but are not limited to, neurodegenerative diseases (including, but not limited to, Lewy body disease, postpoliomyelitis syndrome, Shy-Draeger syndrome, olivopontocerebellar atrophy, Parkinson's disease, multiple system atrophy, striatonigral degeneration, spinocerebellar ataxia, spinal muscular atrophy), tauopathies (including, but not limited to, Alzheimer disease and supranuclear palsy), prion diseases (including, but not limited to, bovine spongiform encephalopathy, scrapie, Creutz-feldt-Jakob syndrome, kuru, Gerstmann-Straussler-Scheinker disease, chronic wasting disease, and fatal familial insomnia), bulbar palsy, motor neuron disease, and nervous system heterodegenerative disorders (including, but not limited to, Canavan disease, Huntington's disease, neuronal ceroid-lipofuscinosis, Alexander's disease, Tourette's syndrome, Menkes kinky hair syndrome, Cockayne syndrome, Halervorden-Spatz syndrome, lafora disease, Rett syndrome, hepatolenticular degeneration, Lesch-Nyhan syndrome, and Unverricht-Lundborg syndrome), dementia (including, but not limited to, Pick's disease, and spinocerebellar ataxia), cancer (e.g. of the CNS and/or brain, including brain metastases resulting from cancer elsewhere in the body).

[0149] A “neurological disorder drug” is a drug or therapeutic agent useful in treating or ameliorating the effects of one or more neurological disorder(s). Neurological disorder drugs of the invention include, but are not limited to, small molecule compounds, antibodies, peptides, proteins, natural ligands of one or more CNS target(s), modified versions of natural ligands of one or more CNS target(s), aptamers, inhibitory nucleic acids (i.e., small inhibitory RNAs (siRNA) and short hairpin RNAs (shRNA)), ribozymes, or active fragments of any of the foregoing. Exemplary neurological disorder drugs of the invention are described herein and include, but are not limited to: antibodies, aptamers, proteins, peptides, inhibitory nucleic acids and small molecules and active fragments of any of the foregoing that either are themselves or specifically recognize and/or act upon (i.e., inhibit, activate, or detect) a CNS antigen or target molecule such as, but not limited to, amyloid precursor protein or portions thereof, amyloid beta, beta-secretase, gamma-secretase, tau, alpha-synuclein, parkin, huntingtin, DR6, presenilin, ApoE, glioma or other CNS cancer markers, and neurotrophins Non-limiting examples of neurological disorder drugs and the corresponding disorders they may be used to treat: Brain-derived neurotrophic factor (BDNF), Chronic brain injury (Neurogenesis), Fibroblast growth factor 2 (FGF-2), Anti-Epidermal Growth Factor Receptor Brain cancer, (EGFR)-antibody, Glial cell-line derived neural factor Parkinson's disease, (GDNF), Brain-derived neurotrophic factor (BDNF) Amyotrophic lateral sclerosis, depression, Lysosomal enzyme Lysosomal storage disorders of the brain, Ciliary neurotrophic factor (CNTF) Amyotrophic lateral sclerosis, Neuregulin-1 Schizophrenia, Anti-HER2 antibody (e.g. trastuzumab) Brain metastasis from HER2-positive cancer.

[0150] The term “pharmaceutical formulation” refers to a preparation which is in such form as to permit the biological activity of an active ingredient contained therein to be effective, and which contains no additional components which are unacceptably toxic to a subject to which the formulation would be administered.

[0151] As used herein, “pharmaceutically acceptable carrier or diluent” means any substance suitable for use in administering to an individual. For example, a pharmaceutically acceptable carrier can be a sterile aqueous solution, such as phosphate buffer saline (PBS) or water-for-injection.

[0152] As used herein, “pharmaceutically acceptable salts” means physiologically and pharmaceutically acceptable salts of compounds, such as oligomeric compounds or oligonucleotides, i.e., salts that retain the desired biological activity of the parent compound and do not impart undesired toxicological effects thereto.

[0153] Pharmaceutically acceptable acidic/anionic salts for use in the invention include, and are not limited to acetate, benzenesulfonate, benzoate, bicarbonate, bitartrate, bromide, calcium edetate, camsylate, carbonate, chloride, citrate, dihydrochloride, edetate, edisylate, estolate, esylate, fumarate, glyceptate, gluconate, glutamate, glycollylarsanilate, hexylresorcinate, hydrabamine, hydrobromide, hydrochloride, hydroxynaphthoate, iodide, isethionate, lactate, lactobionate, malate, maleate, mandelate, mesylate, methylbromide, methylnitrate, methylsulfate, mucate, napsylate, nitrate, pamoate, pantothenate, phosphate/diphosphate, polygalacturonate, salicylate, stearate, subacetate, succinate, sulfate, tannate, tartrate, teoclate, tosylate and triethiodide. Organic or inorganic acids also include, and are not limited to, hydriodic, perchloric, sulfuric, phosphoric, propionic, glycolic, methanesulfonic, hydroxyethanesulfonic, oxalic, 2-naphthalenesulfonic, p-toluenesulfonic, cyclohexanesulfamic, saccharinic or trifluoroacetic acid. Pharmaceutically acceptable basic/cationic salts include, and are not limited to aluminum, 2-amino-2-hydroxymethyl-propane-1,3-diol (also known as tris(hydroxymethyl)aminomethane, tromethane or “TRIS”), ammonia, benzathine, t-butylamine, calcium, chloroprocaine, choline, cyclohexylamine, diethanolamine, ethylenediamine, lithium, L-lysine, magnesium, meglumine, N-methyl-D-glucamine, piperidine, potassium, procaine, quinine, sodium, triethanolamine, or zinc.

[0154] “Polypeptide” or “protein” means a molecule that comprises at least two amino acid residues linked by a peptide bond to form a polypeptide. Small polypeptides of less than 50 amino acids may be referred to as “peptides”.

[0155] The phrases “sequence identity” or “percent (%) sequence identity” or “% identity” or “% identical to” when used with reference to an amino acid sequence describe the number of matches (“hits”) of identical amino acids of two or more aligned amino acid sequences as compared to the number of amino acid residues making up the overall length of the amino acid sequences. In other terms, using an alignment, for two or more sequences the percentage of amino acid residues that are the same (e.g. 90%, 91%, 92%, 93%, 94%, 95%, 97%, 98%, 99%, or 100% identity over the full-length of the amino acid sequences) may be determined, when the sequences are compared and aligned for maximum correspondence as measured using a sequence comparison algorithm as known in the art, or when manually aligned and visually inspected. The sequences which are compared to determine sequence identity may thus differ by substitution(s), addition(s) or deletion(s) of amino acids. Suitable programs for aligning protein sequences are known to the skilled person. The percentage sequence identity of protein sequences can, for example, be determined with programs such as CLUSTALW, Clustal Omega, FASTA or BLAST, e.g. using the NCBI BLAST algorithm (Altschul S F, et al (1997), Nucleic Acids Res. 25:3389-3402).

[0156] The term “substantially identical” in the context of two amino acid sequences means that the sequences, when optimally aligned, such as by the programs GAP or BESTFIT using default gap weights, share at least about 50 percent sequence identity. Typically sequences that are substantially identical will exhibit at least about 60, at least about 70, at least about 80, at least about 90, at least about 95, at least about 98, or at least about 99 percent sequence identity.

[0157] “Specific binding” or “specifically binds” or “binds” refer to antibody binding to an antigen or an epitope within the antigen with greater affinity than for other antigens. Typically, the antibody binds to the antigen or the epitope within the antigen with a dissociation constant (K_{D}) of about 1×10⁻⁸ M or less, for example about 1×10⁻⁹ M or less, about 1×10⁻¹⁰ M or less, about 1×10⁻¹¹ M or less, or about 1×10⁻¹² M or less, typically with a K_{D} that is at least one hundred fold less than its K_{D} for binding to a non-specific antigen (e.g., BSA, casein). K_{D} is the equilibrium dissociation constant, a ratio of k_{off}/kₒₙ, between the antibody and its antigen. K_{D} and affinity are inversely related. The “on-rate” (kₒₙ) is a constant used to characterize how quickly the antibody binds to its target. The “off-rate” (k_{off}) is a constant used to characterize how quickly an antibody dissociates from its target. The dissociation constant K_{D} can be measured using standard procedures. For example, the K_{D} of an antibody can be determined by using surface plasmon resonance, such as by using a biosensor system, e.g., a Biacore® system, or by using bio-layer interferometry technology, such as an Octet RED96 system. The smaller the value of the K_{D} of an antibody, the higher affinity that the antibody binds to a target antigen. Antibodies that specifically bind to the antigen or the epitope within the antigen can, however, have cross-reactivity to other related antigens, for example to the same antigen from other species (homologs), such as human or monkey, for example Macaca fascicularis (cynomolgus, cyno), Pan troglodytes (chimpanzee, chimp) or Callithrix jacchus (common marmoset, marmoset). While a monospecific antibody specifically binds one antigen or one epitope, a bispecific antibody specifically binds two distinct antigens or two distinct epitopes.

[0158] The term “subject” as used herein refers to a mammal. Mammals include, but are not limited to, domesticated animals (e.g., cows, sheep, cats, dogs, and horses), primates (e.g., humans and non-human primates such as monkeys), rabbits, and rodents (e.g., mice and rats). In certain embodiments, the individual or subject is a human. When the subject is human, they can also be referred to as a “patient”.

[0159] The term “transferrin receptor” or “TfR,” as used herein, refers to a cell surface receptor necessary for cellular iron uptake by the process of receptor-mediated endocytosis. carrier protein for transferrin. A TfR is involved in iron uptake in vertebrates and is regulated in response to intracellular iron concentration. It imports iron by internalizing the transferrin-iron complex through receptor-mediated endocytosis. Two transferrin receptors in humans, transferrin receptor 1 and transferrin receptor 2, have been characterized. Both these receptors are transmembrane glycoproteins. TfR1 is a high affinity ubiquitously expressed receptor. TfR2 binds to transferrin with a 25-30-fold lower affinity than TfR1. The expression of TfR2 is restricted to certain cell types and is unaffected by intracellular iron concentrations. In one embodiment, the TfR is a human TfR comprising the amino acid sequence as in Schneider et al. Nature 311: 675-678 (1984), for example. It can have a molecular weight of about 180,000 Dalton, having two subunits each of apparent molecular weight of about 90,000 Dalton. Preferably, the TfR is a human TfR1.

[0160] A “target antigen” or “brain target,” as used herein, refers to an antigen and/or molecule expressed in the CNS, including the brain, which can be targeted with an antibody or small molecule. Examples of such antigens and/or molecules include, without limitation: beta-secretase 1 (BACE1), amyloid beta (Abeta), epidermal growth factor receptor (EGFR), human epidermal growth factor receptor 2 (HER2), Tau, apolipoprotein E4 (ApoE4), alpha-synuclein, CD20, huntingtin, prion protein (PrP), leucine rich repeat kinase 2 (LRRK2), parkin, presenilin 1, presenilin 2, gamma secretase, death receptor 6 (DR6), amyloid precursor protein (APP), p75 neurotrophin receptor (p75NTR), and caspase 6. In some embodiments, the target antigen is BACE1. In some embodiments, the target antigen is Tau.

[0161] As used herein, “treatment” (and grammatical variations thereof such as “treat” or “treating”) refers to clinical intervention in an attempt to alter the natural course of the individual being treated, and can be performed either for prophylaxis or during the course of clinical pathology. Desirable effects of treatment include, but are not limited to, preventing occurrence or recurrence of disease, alleviation of symptoms, diminishment of any direct or indirect pathological consequences of the disease, preventing metastasis, decreasing the rate of disease progression, amelioration or palliation of the disease state, and remission or improved prognosis. In some embodiments, antibodies of the invention are used to delay development of a disease or to slow the progression of a disease.

[0162] Antibodies or immunoglobulins can be assigned to five major classes, namely IgA, IgD, IgE, IgG and IgM, depending on the heavy chain constant domain amino acid sequence. IgG is the most stable of the five types of immunoglobulins, having a serum half-life in humans of about 23 days. IgA and IgG are further sub-classified as the isotypes IgA₁, IgA₂, IgG₁, IgG₂, IgG₃ and IgG₄. Each of the four IgG subclasses has different biological functions known as effector functions. These effector functions are generally mediated through interaction with the Fc receptor (FcγR) and/or by binding C1q and fixing complement. Binding to FcγR can lead to antibody dependent cell mediated cytolysis or antibody-dependent cellular cytotoxicity (ADCC), whereas binding to complement factors can lead to complement mediated cell lysis or complement-dependent cytotoxicity (CDC). An anti-TfR antibody of the invention, or a therapeutic or diagnostic antibody to be conjugated or fused to the anti-TfR antibody can have no or minimal effector function, but retains its ability to bind FcRn, the binding of which can be a primary means by which antibodies have an extended in vivo half-life.

[0163] Binding of FcγR or complement (e.g., C1q) to an antibody is caused by defined protein-protein interactions at the so-called Fc part binding site. Such Fc part binding sites are known in the art. Such Fc part binding sites include, e.g., characterized by the amino acids L234, L235, D270, N297, E318, K320, K322, P331, and P329 (numbering according to EU index of Kabat). In some embodiment, an anti-TfR antibody of the invention, or a therapeutic or diagnostic antibody to be conjugated or fused to the anti-TfR antibody contains one or more substitutions in one or more Fc part binding sites to eliminate the effector function. For example, an anti-TfR antibody of the invention, or a therapeutic or diagnostic antibody to be conjugated or fused to the anti-TfR antibody can contain a Fc region containing one or more of the following substitutions: substitution of proline for glutamate at residue 233, alanine or valine for phenylalanine at residue 234 and alanine or glutamate for leucine at residue 235 (EU numbering, Kabat, E. A. et al. (1991) Sequences of Proteins of Immunological Interest, 5th Ed. U.S. Dept. of Health and Human Services, Bethesda, Md., NIH Publication no. 91-3242). Preferably, the antibody of interest contains one, two or three mutations of L234A, L235A and P331S (EU numbering, Kabat).

[0164] Antibodies of subclass IgG1, IgG2, and IgG3 usually show complement activation including C1q and C3 binding, whereas IgG4 does not activate the complement system and does not bind C1q and/or C3. Human IgG4 Fc region has reduced ability to bind FcγR and complement factors compared to other IgG sub-types. Preferably, an anti-TfR antibody of the invention, or a therapeutic or diagnostic antibody to be conjugated or fused to the anti-TfR antibody comprises a Fc region derived from human IgG4 Fc region. More preferably, the Fc region contains human IgG4 Fc region having substitutions that eliminate effector function. For example, removing the N-linked glycosylation site in the IgG4 Fc region by substituting Ala for Asn at residue 297 (EU numbering) is another way to ensure that residual effector activity is eliminated.

### Anti-TfR Antibodies and Antigen Binding Fragments Thereof

[0165] In one general aspect, the application relates to an antibody or an antigen binding fragment thereof that binds to a primate TfR, such as a human TfR or a monkey TfR, and the antibody or an antigen binding fragment thereof is optimized for delivering an agent to the brain of a subject in need thereof. The relationship between the binding affinity of an anti-TfR antibody to the TfR and transcytosis efficiency has been described previously as improved transcytosis with decreased affinity for TfR (Yu, Zhang et al. 2011, Sci Transl Med 3(84): 84ra44) The inventors of the present invention surprisingly discovered a more nuanced relationship between affinity and transcytosis efficiency than what has been previously described, with influence from both on- and off-rates impacting brain concentration. In particular, a neutral off-rate that is neither too fast nor too slow is required for optimal brain PK and PD of an agent (such as an mAb) to be efficiently delivered by the anti-TfR antibody or antigen binding fragment thereof.

[0166] Preferably, an anti-TfR antibody or antigen binding fragment thereof of the application is pH-sensitive, e.g., it has different binding affinities to TfR at different pHs. For example, an anti-TfR antibody of the application can bind to cell surface TfR at a neutral pH, such as physiological pH (e.g., pH 7.4), with high affinity, but upon internalization into an endosomal compartment, dissociates from TfR at an acidic pH, such as the relatively lower pH (pH 5.0-6.0). Affinity is a measure of the strength of binding between two moieties, e.g., an antibody and an antigen. Affinity can be expressed in several ways. One way is in terms of the dissociation constant (K_{D}) of the interaction. K_{D} can be measured by routine methods, include equilibrium dialysis or by directly measuring the rates of antigen-antibody dissociation and association, the k_{off}(k_{d} or k_{dis}) and kₒₙ (or kₐ) rates, respectively (see e.g., Nature, 1993 361:186-87). The ratio of k_{off}/kₒₙ cancels all parameters not related to affinity, and is equal to the dissociation constant K_{D} (see, generally, Davies et al., Annual Rev Biochem, 1990 59:439-473). Thus, a smaller K_{D} means a higher affinity. Another expression of affinity is Kₐ, which is the inverse of K_{D}, or kₒₙ/k_{off}. Thus, a higher Kₐ means a higher affinity. For example, an antibody or antigen binding fragment thereof for use in a composition and/or method of the application can be an antibody or fragment thereof that binds to a TfR with a K_{D} of 1 nanomolar (nM, 10˜9 M) or more at a neutral pH (e.g., pH 6.8-7.8), such as a physiological pH (e.g., pH 7.4), and dissociates from TfR with a k_{dis} of 10⁻⁴ sec⁻¹ or more at an acidic pH (e.g., pH 4.5-6.0), such as pH5.0).

[0167] Accordingly, a general aspect of the application relates to an anti-TfR antibody or antigen-binding fragment thereof for delivering an agent to the brain of a subject in need thereof, wherein the anti-TfR antibody or antigen-binding fragment thereof binds to a transferrin receptor (TfR), preferably human TfR1, with a dissociation constant K_{D} of at least 1 nM, preferably 1 nM to 500 nM, at neutral pH and an off-rate constant k_{d} of at least 10⁻⁴ sec⁻¹, preferably 10⁻⁴ to 10⁻¹ sec⁻¹, at an acidic pH, preferably pH 5.

[0168] In one embodiment, the anti-TfR antibody or antigen-binding fragment thereof of the application has an off-rate constant k_{d} of 2×10⁻² to 2×10⁻⁴ sec⁻¹, such as 2×10⁻², 1×10⁻², 9×10⁻³, 8×10⁻³, 7×10⁻³, 6×10⁻³, 5×10⁻³, 4×10⁻³, 3×10⁻³, 2×10⁻³, 1×10⁻³, 9×10⁻⁴, 8×10⁻⁴, 7×10⁻⁴, 6×10⁻⁴, 5×10⁻⁴, 4×10⁻⁴, 3×10⁻⁴, 2×10⁻⁴ sec⁻¹, or any value in between, at the neutral pH.

[0169] In certain embodiments, the antibody or antigen binding fragment thereof that binds to human TfR is a single variable domain on a heavy chain (VHH) antibody comprising heavy chain complementarity determining regions (HCDRs) HCDR1, HCDR2 and HCDR3 having the amino acid sequences of:
[0170] (i) SEQ ID NOs: 7, 8 and 9, respectively;
[0171] (ii) SEQ ID NOs: 317, 318 and 319, respectively;
[0172] (iii) SEQ ID NOs: 324, 325 and 326, respectively;
[0173] (iv) SEQ ID NOs: 331, 332 and 333, respectively; or
[0174] (v) SEQ ID NOs: 338, 339 and 340, respectively.

[0175] Preferably, it is a VHH fragment comprising an amino acid sequence having at least 80%, such as at least 85%, 90%, 91%, 92%, 93%, 94%, 95%, 96%, 97%, 98%, 99% or 100%, sequence identity to SEQ ID NO: 6, 316, 323, 330, or 337.

[0176] In other embodiments, the antibody or antigen binding fragment thereof that binds to human TfR comprises a heavy chain variable region comprising heavy chain complementarity determining regions (HCDRs) HCDR1, HCDR2 and HCDR3, and a light chain variable region comprising light chain complementarity determining regions (LCDRs) LCDR1, LCDR2 and LCDR3, wherein the HCDR1, HCDR2, HCDR3, LCDR1, LCDR2 and LCDR3 have the amino acid sequences of:
[0177] (i) SEQ ID NOs: 292, 293, 294, 295, 296, and 297, respectively;
[0178] (ii) SEQ ID NOs: 279, 280, 281, 282, 283 and 284, respectively;
[0179] (iii) SEQ ID NOs: 29, 30, 31, 32, 33 and 34, respectively;
[0180] (iv) SEQ ID NOs: 57, 58, 59, 60, 61 and 62, respectively;
[0181] (v) SEQ ID NOs: 85, 86, 87, 88, 89 and 90, respectively;
[0182] (vi) SEQ ID NOs: 110, 111, 112, 113, 114 and 115, respectively;
[0183] (vii) SEQ ID NOs: 135, 136, 137, 138, 139 and 140, respectively;
[0184] (viii) SEQ ID NOs: 191, 192, 193, 194, 195 and 196, respectively;
[0185] (ix) SEQ ID NOs: 244, 245, 246, 247, 248 and 249, respectively;
[0186] (x) SEQ ID NOs: 263, 264, 265, 266, 267 and 268, respectively;
[0187] (xi) SEQ ID NOs: 345, 346, 347, 348, 349 and 350, respectively;
[0188] (xii) SEQ ID NOs: 355, 356, 357, 358, 359 and 360, respectively;
[0189] (xiii) SEQ ID NOs: 365, 366, 367, 368, 369 and 370, respectively;
[0190] (xiv) SEQ ID NOs: 375, 376, 377, 378, 379 and 380, respectively;
[0191] (xv) SEQ ID NOs: 385, 386, 387, 388, 389 and 390, respectively;
[0192] (xvi) SEQ ID NOs: 395, 3%, 377, 398, 399 and 400, respectively;
[0193] (xvii) SEQ ID NOs: 405, 406, 407, 408, 409 and 410, respectively;
[0194] (xviii) SEQ ID NOs: 415, 416, 417, 418, 419 and 420, respectively;
[0195] (xix) SEQ ID NOs: 425, 426, 427, 428, 429 and 430, respectively;
[0196] (xx) SEQ ID NOs: 435, 436, 437, 438, 439 and 440, respectively;
[0197] (xxi) SEQ ID NOs: 445, 446, 447, 448, 449 and 450, respectively;
[0198] (xxii) SEQ ID NOs: 455, 456, 457, 458, 459 and 460, respectively;
[0199] (xxiii) SEQ ID NOs: 465, 466, 467, 468, 469 and 470, respectively;
[0200] (xxiv) SEQ ID NOs: 475, 476, 477, 478, 479 and 480, respectively;
[0201] (xxv) SEQ ID NOs: 485, 486, 487, 488, 489 and 490, respectively;
[0202] (xxvi) SEQ ID NOs: 495, 4%, 497, 498, 499 and 500, respectively;
[0203] (xxvii) SEQ ID NOs: 505, 506, 507, 508, 509 and 510, respectively;
[0204] (xxviii) SEQ ID NOs: 515, 516, 517, 518, 519 and 520, respectively;
[0205] (xxix) SEQ ID NOs: 525, 526, 527, 528, 529 and 530, respectively;
[0206] (xxx) SEQ ID NOs: 535, 536, 537, 538, 539 and 540, respectively; or
[0207] (xxxi) SEQ ID NOs: 545, 546, 547, 548, 549 and 550, respectively.

[0208] In other embodiments, an antibody or antigen binding fragment thereof of the application competes with an antibody or antigen binding fragment exemplified herein. The binding site of an antibody or antigen can be determined by known methods such as ELISA, Western blot, etc. In certain embodiments, such a competing antibody binds to the same epitope (e.g., a linear or a conformational epitope) that is bound by an exemplified antibody or antigen binding fragment thereof. Detailed exemplary methods for mapping an epitope to which an antibody binds are provided in Morris, G. E., (ed.), “Epitope Mapping Protocols,” In: Methods in Molecular Biology, Vol. 66, Humana Press, Totowa, N.J. (1996). An “antibody that binds to the same epitope” as a reference antibody refers to an antibody that blocks binding of the reference antibody to its antigen in a competition assay by 50% or more, and conversely, the reference antibody blocks binding of the antibody to its antigen in a competition assay by 50% or more.

[0209] Preferably, the antibody or antigen-binding fragment thereof is single-chain variable fragment (scFv) comprising the heavy chain variable region (Hv) covalently linked to the light chain variable region (Lv) via a flexible linker. The scFv can retain the specificity of the original immunoglobulin, despite removal of the constant regions and the introduction of the linker. In a scFv, the order of the domains can be either Hv-linker-Lv, or Lv-linker-Hv. The linker can be designed de novo or derived from known protein structure to provide a compatible length and conformational in bridging the variable domains of a scFv without serious steric interference. The linker can have 10 to about 25 amino acids in length. Preferably, the linker is a peptide linker spanning about 3.5 nm (35 Å) between the carboxy terminus of the variable domain and the amino terminus of the other domain without affecting the ability of the domains to fold and form an intact antigen-binding site (Huston et al., Methods in Enzymology, vol. 203, pp. 46-88, 1991, which is incorporated herein by reference in its entirety). The linker preferably comprises a hydrophilic sequence in order to avoid intercalation of the peptide within or between the variable domains throughout the protein folding (Argos, Journal of Molecular Biology, vol. 211, no. 4, pp. 943-958, 1990). For example, the linker can comprise Gly and Ser residues and/or together with the charged residues such as Glu, Thr and Lys interspersed to enhance the solubility. In one embodiment, the linker has the amino acid sequence of SEQ ID NO: 314 (GTEGKSSGSGSESKST). Any other suitable linker can also be used in view of the present disclosure.

[0210] In some embodiments, the scFv comprises an amino acid sequence having at least 80%, such as at least 85%, 90%, 91%, 92%, 93%, 94%, 95%, 96%, 97%, 98%, 99% or 100%, sequence identity to the amino acid sequences of SEQ ID NO: 278, 291, 28, 56, 84, 109, 134, 162, 190, 218, 243, 262, 344, 354, 364, 374, 384, 394, 404, 414, 424, 434, 444, 454, 464, 474, 484, 494, 504, 514, 524, 534 or 544.

[0211] In a preferred embodiment, an antibody or antigen binding fragment thereof that binds to TfR, preferably human TfR1, does not contain a free cysteine.

[0212] An anti-TfR antibody or antigen-binding fragment thereof (such as a VHH or scFv fragment) can be produced using suitable methods in the art in view of the present disclosure. For example, a VHH or scFv fragment can be recombinantly produced by growing a recombinant host cell (such as a bacterial, yeast or mammalian cell) under suitable conditions for the production of the antibody fragment and recovering the fragment from the cell culture.

### Brain Shuttle Construct

[0213] An optimized RMT brain delivery platform is developed using the transferrin receptor (TfR) by enhancing the intrinsic transcytosis efficiency, extending peripheral pharmacokinetics, and engineering for an acceptable safety profile while maintaining efficacy of the therapeutic mAb. The interplay between transcytosis receptor affinity and brain concentration in human TfR knock-in mice is studied. A thorough study of binding kinetics demonstrate that for optimal brain PK and PD of mAbs, a neutral off-rate that is neither too fast nor too slow is required. The enhanced brain delivery observed in mice was confirmed in cynomolgus monkey.

[0214] It is also discovered that engineered antibody constant region with increased binding to the neonatal Fc receptor (FcRn) resulted in decreased peripheral clearance and enhancement in brain concentration.

[0215] Additional Fc mutations are introduced to abolish binding to Fc gamma receptors (FcγR) and avoid effector function mediated toxicity. When coupled with a high affinity anti-Tau binding mAb, these mutations prevent effector function mediated toxicity in the periphery while maintaining antibody dependent phagocytosis (ADP) through a novel, non-FcγR mechanism for microglial uptake and target degradation. This mechanism is dependent upon internalization through the TfR receptor and is more efficient in promoting target degradation than traditional FcγR mediated ADP without the stimulating the secretion of pro-inflammatory cytokines. To the knowledge of the inventors, this is the first report of non-FcγR mediated ADP, representing a novel, efficient, non-inflammatory mechanism for phagocytosis that can be exploited for a variety of therapeutic applications.

[0216] Accordingly, in one general aspect, the application relates to an antibody-targeted brain delivery system comprising an anti-TfR antibody or antigen binding fragment thereof of the application. The anti-TfR antibody or antigen binding fragment thereof can be used to deliver a therapeutic or diagnostic agent into a cell (e.g., a cancer cell) or a BBB system. Agents that can be delivered include any neurological disorder drug or agent that can be used to detect or analyze a neurological disorder drug. For example, such agent can be neurotrophic factors, including, but not limited to, nerve growth factor (NGF), brain derived neurotrophic factor (BDNF), ciliary neurotrophic factor (CNTF), glial cell-line neurotrophic factor (GDNF) and insulin-like growth factor (IGF); neuropeptides, including, but not limited to, Substance P, neuropeptide Y, vasoactive intestinal peptide (VIP), gamma-amino-butyric acid (GABA), dopamine, cholecystokinin (CCK), endorphins, enkephalins and thyrotropin releasing hormone (TRH); cytokines; anxiolytic agents; anticonvulsants; polynucleotides and transgenes, including, for example, small interfering RNAs and/or antisense oligos; or antibodies or antigen binding fragments thereof that bind to a brain target. An anti-hTfR antibody or antigen binding fragment thereof of the application can be an effective means to enhance the delivery of an agent of interest from the blood into the brain and function there.

[0217] In particular, an agent of interest can be delivered in a combined form or linked to an anti-TfR antibody or antigen binding fragment thereof of the application, parenterally, e.g., intravenously. For example, the agent can be non-covalently attached to the anti-TfR antibody or antigen binding fragment thereof. The agent can also be covalently attached to the anti-TfR antibody or antigen binding fragment thereof to form a conjugate. In certain embodiments, the conjugation is by construction of a protein fusion (i.e., by genetic fusion of the two genes encoding an anti-TfR antibody or antigen binding fragment thereof and a neurological disorder drug and expression as a single protein). Known methods can be used to link an agent to an antibody or antigen binding fragment thereof in view of the present disclosure. See, for example, Wu et al., Nat Biotechnol., 23(9):1137-46, 2005; Trail et al., Cancer Immunol Immunother., 52(5):328-37, 2003; Saito et al., Adv Drug Deliv Rev., 55(2):199-215, 2003; Jones et al., Pharmaceutical Research, 24(9):1759-1771, 2007.

[0218] In some embodiments, a therapeutic or diagnostic agent to be delivered to the brain and an anti-TfR antibody or antigen binding fragment thereof can be covalently linked together (or conjugated) via a non-peptide linker or a peptide linker. Examples of non-peptide linkers include, but are not limited to, polyethylene glycol, polypropylene glycol, copolymer of ethylene glycol and propylene glycol, polyoxyethylated polyol, polyvinyl alcohol, polysaccharides, dextran, polyvinyl ether, biodegradable polymer, polymerized lipid, chitins, and hyaluronic acid, or derivatives thereof, or combinations thereof. A peptide linker can be a peptide chain consisting of 1 to 50 amino acids linked by peptide bonds or a derivative thereof, whose N-terminus and C-terminus can be covalently linked to an anti-TfR antibody or an antigen binding fragment thereof.

[0219] In certain embodiments, a conjugate of the application is a multi-specific antibody comprising a first antigen binding region which binds a TfR and a second antigen binding region which binds a brain antigen, such as beta-secretase 1 (BACE1), tau, and the other brain antigens disclosed herein. Techniques for making multi-specific antibodies include, but are not limited to, recombinant co-expression of two immunoglobulin heavy chain-light chain pairs having different specificities (see Milstein and Cuello, Nature 305: 537, 1983), WO 93/08829, and Traunecker et al, EMBO J. 10: 3655, 1991), and “knob-in-hole” engineering (see, e.g., U.S. Pat. No. 5,731,168). Multi-specific antibodies can also be made by engineering electrostatic steering effects (WO 2009/089004A1); cross-linking two or more antibodies or fragments (see, e.g., U.S. Pat. No. 4,676,980, and Brennan et al, Science, 229: 81, 1985); using leucine zippers (see, e.g., Kostelny et al, J. Immunol., 148(5): 1547-1553, 1992)); using “diabody” technology (see, e.g., Hollinger et al, Proc. Natl. Acad. Sci. USA, 90:6444-6448, 1993)); using single-chain Fv (sFv) dimers (see, e.g. Gruber et al, J. Immunol, 152:5368 (1994)); and preparing trispecific antibodies as described, e.g., in Tutt et al. J. Immunol. 147: 60, 1991. A multi-specific antibody of the application also encompasses antibodies having three or more functional antigen binding sites, including “Octopus antibodies” or “dual-variable domain immunoglobulins” (DVDs) (see, e.g. US 2006/0025576A1, and Wu et al. Nature Biotechnology, 25(11):1290-7, 2007). A multi-specific antibody of the application also encompasses a “Dual Acting Fab” or “DAF” comprising an antigen binding region that binds to TfR as well as the brain antigen (e.g. BACE1 or Tau) (see, US 2008/0069820, for example). In one embodiment, the antibody is an antibody fragment, various such fragments being disclosed herein.

[0220] In one embodiment, a multi-specific antibody of the application is a fusion construct comprising an anti-TfR antibody or antigen-binding fragment thereof of the application covalently linked (or fused) to a second antibody or antigen binding fragment thereof. Preferably, the second antibody or antigen binding fragment thereof binds to a brain target, such as BACE, tau or other brain antigens, such as those described herein. The anti-TfR antibody or antigen-binding fragment thereof can be fused to the carboxy- and/or amino-terminus of a light and/or heavy chain of the second antibody or antigen binding fragment thereof, directly or via a linker.

[0221] In one embodiment, the anti-TfR antibody or antigen-binding fragment thereof is fused to the carboxy-terminus of a light chain of the second antibody or antigen binding fragment thereof, directly or via a linker.

[0222] In another embodiment, the anti-TfR antibody or antigen-binding fragment thereof is fused to the amino-terminus of a light chain of the second antibody or antigen binding fragment thereof, directly or via a linker.

[0223] In another embodiment, the anti-TfR antibody or antigen-binding fragment thereof is fused to the carboxy-terminus of a heavy chain of the second antibody or antigen binding fragment thereof, directly or via a linker.

[0224] In another embodiment, the anti-TfR antibody or antigen-binding fragment thereof is fused to the amino-terminus of a heavy chain of the second antibody or antigen binding fragment thereof, directly or via a linker.

[0225] In a preferred embodiment, a fusion construct of the application comprises an anti-TfR antibody or antigen-binding fragment thereof, preferably an anti-huTfR1 VHH or scFv fragment, of the application covalently linked, via a linker, to the carboxy terminus of only one of the two heavy chains of a second antibody or antigen binding fragment thereof that binds to a brain target. Preferably, the linker has the amino acid sequence of SEQ ID NO: 312 or SEQ ID NO: 313.

[0226] To facilitate the formation of a heterodimer between the two heavy chains, e.g., one with a fusion of the anti-TfR antibody or antigen-binding fragment thereof and one without, or one containing the Fc for the anti-TfR arm and one for the anti-brain target arm, heterodimeric mutations introduced into the Fc of the two heavy chains. Examples of such Fc mutations include, but are not limited to, the Zymework mutations (see, e.g., U.S. Pat. No. 10,457,742) and the “knob in hole” mutations (see, e.g., Ridgway et al., Protein Eng., 9(7): 617-621, 1996). Other heterodimer mutations can also be used in the invention. In some embodiment, a modified CH3 as described herein is used to facilitate the formation of a heterodimer between the two heavy chains.

[0227] In addition to the heterodimeric mutations, other mutations can also be introduced. In some embodiment, the Fc region of the fusion construct or bispecific antibody further comprises one or more mutations that alter (increase or diminish), preferably eliminate ADCC/CDC (such as the AAS mutations described herein), and/or one or more mutations that alter (increase or diminish), preferably increase, the binding of the fusion construct or bispecific antibody to FcRn (such as the YTE mutations described herein). In some embodiment, one or more cysteine residues in the fusion construct or bispecific antibody are substituted with other amino acids, such as serine.

[0228] In certain embodiments, a fusion construct of the application comprises:
[0229] (1) a first heavy chain having an amino acid sequence that is at least 80%, such as at least 85%, 90%, 95% or 100%, identical to an amino acid sequence selected from the group consisting of SEQ ID NOs: 301, 304, 307, 285, 288, 298, 10, 13, 16, 19, 22, 25, 35, 38, 41, 44, 47, 50, 53, 63, 66, 69, 72, 75, 78, 81, 91, 94, 97, 100, 103, 106, 116, 119, 122, 125, 128, 131, 141, 144, 147, 150, 153, 156, 159, 169, 172, 175, 178, 181, 184, 187, 197, 200, 203, 206, 209, 212, 215, 225, 228, 231, 234, 237, 240, 250, 252, 256, 259, 269, 272, 275, 320, 327, 334, 341, 351, 361, 371, 381, 391, 401, 411, 421, 431, 441, 451, 461 and 471;
[0230] (2) two light chains each independently having an amino acid sequence that is at least 80%, such as at least 85%, 90%, 95% or 100%, identical to an amino acid sequence selected from the group consisting of 302, 305, 308, 286, 289, 299, 11, 14, 17, 20, 23, 26, 36, 39, 42, 45, 48, 51, 54, 64, 67, 70, 73, 76, 79, 82, 92, 95, 98, 101, 104, 107, 117, 120, 123, 126, 129, 132, 142, 145, 148, 151, 154, 157, 160, 170, 173, 176, 179, 182, 185, 188, 198, 201, 204, 207, 210, 213, 216, 226, 229, 232, 235, 238, 241, 251, 253, 257, 260, 270, 273 276, 321, 328, 335, 342, 352, 362, 372, 382, 392, 402, 412, 422, 432, 442, 452, 462 and 472, respectively; and
[0231] (3) a second heavy chain having an amino acid sequence that is at least 80%, such as at least 85%, 90%, 95% or 100%, identical to an amino acid sequence selected from the group consisting of 303, 306, 309, 287, 290, 300, 12, 15, 18, 21, 24, 27, 37, 40, 43, 46, 49, 52, 55, 65, 68, 71, 74, 77, 80, 83, 93, 96, 99, 102, 105, 108, 118, 121, 124, 127, 130, 133, 143, 146, 149, 152, 155, 158, 161, 171, 174, 177, 180, 183, 186, 189, 199, 202, 205, 208, 211, 214, 217, 227, 230, 233, 236, 239, 242, 252, 254, 258, 261, 271, 274, 277, 322, 329, 336, 343, 353, 363, 373, 383, 393, 403, 413, 423, 433, 443, 453, 463 and 473, respectively.

[0232] A conjugate, such as a multi-specific antibody or fusion construct, of the application can be produced by any of a number of techniques known in the art in view of the present disclosure. For example, it can be expressed from a recombinant host cells, wherein expression vector(s) encoding the heavy and light chains of the fusion construct or multi-specific antibody is (are) transfected into a host cell by standard techniques. The host cells can be prokaryotic or eukaryotic host cells.

[0233] In an exemplary system, one or more recombinant expression vectors encoding the heterodimeric two heavy chains and the light chains of a fusion construct of the application is/are introduced into host cells by transfection or electroporation. The selected transformant host cells are cultured to allow for expression of the heavy and light chains under conditions sufficient to produce the fusion construct, and the fusion construct is recovered from the culture medium. Standard molecular biology techniques are used to prepare the recombinant expression vector, transfect the host cells, select for transformants, culture the host cells and recover the protein construct from the culture medium.

[0234] The application provides an isolated nucleic acid encoding the amino acid sequence of an anti-TfR antibody or antigen binding fragment thereof alone or as part of a fusion construct or multispecific antibody in any of the embodiments described herein or any of the claims. The isolated nucleic acid can be part of a vector, preferably an expression vector.

[0235] In another aspect, the application relates to a host cell transformed with the vector disclosed herein. In an embodiment, the host cell is a prokaryotic cell, for example, E. coli. In another embodiment, the host cell is a eukaryotic cell, for example, a protist cell, an animal cell, a plant cell, or a fungal cell. In an embodiment, the host cell is a mammalian cell including, but not limited to, CHO, COS, NS0, SP2, PER.C6, or a fungal cell, such as Saccharomyces cerevisiae, or an insect cell, such as Sf9.

### Pharmaceutical Composition and Related Methods

[0236] The invention also relates to pharmaceutical compositions, methods of preparation and methods for use thereof.

[0237] In another general aspect, the invention relates to a pharmaceutical composition, comprising an anti-TfR antibody or antigen binding fragment thereof or a conjugate thereof of the invention and a pharmaceutically acceptable carrier. The anti-TfR antibody or antigen binding fragment thereof or conjugate (such as a multi-specific antibody or fusion construct) of the invention is also useful in the manufacture of a medicament for therapeutic applications mentioned herein. The pharmaceutically acceptable carrier can be any suitable excipient, diluent, filler, salt, buffer, stabilizer, solubilizer, oil, lipid, lipid containing vesicle, microsphere, liposomal encapsulation, or other material well known in the art for use in pharmaceutical formulations. It will be understood that the characteristics of the carrier, excipient or diluent will depend on the route of administration for a particular application.

[0238] Accordingly, in one embodiment, the application relates to a method of transporting a therapeutic or diagnostic agent across the blood-brain barrier (BBB) comprising exposing an anti-TfR antibody or antigen binding fragment thereof coupled to the therapeutic or diagnostic agent to the blood-brain barrier such that the antibody or antigen binding fragment thereof transports the agent coupled thereto across the blood-brain barrier. In one embodiment, the agent is a neurological disorder drug. In another embodiment, the agent is an imaging agent or an agent for detecting a neurological disorder. Preferably, the anti-TfR antibody or antigen binding fragment thereof or conjugate thereof does not impair the binding of the TfR to its native ligand transferrin. The antibody specifically binds to TfR in such a manner that it does not inhibit binding of the TfR to transferrin. In some embodiment, the BBB is in a mammal, preferably a primate, such as a human, more preferably a human having a neurological disorder. In one embodiment, the neurological disorder is selected from the group consisting of Alzheimer's disease (AD), stroke, dementia, muscular dystrophy (MD), multiple sclerosis (MS), amyotrophic lateral sclerosis (ALS), cystic fibrosis, Angelman's syndrome, Liddle syndrome, Parkinson's disease, Pick's disease, Paget's disease, cancer, and traumatic brain injury.

[0239] In one embodiment, an anti-TfR antibody or antigen binding fragment thereof, or a conjugate thereof of the application, is used to detect a neurological disorder before the onset of symptoms and/or to assess the severity or duration of the disease or disorder. The antibody, antigen binding fragment or conjugate thereof permits detection and/or imaging of the neurological disorder, including imaging by radiography, tomography, or magnetic resonance imaging (MRI).

[0240] In another embodiment, an anti-TfR antibody or antigen binding fragment thereof, or a conjugate thereof, is used in treating a neurological disorder (e.g., Alzheimers disease), comprising administering to a subject in need of the treatment an effective amount of anti-TfR antibody or antigen binding fragment thereof, or a conjugate thereof. In some embodiments, the method further comprises administering to the subject an effective amount of at least one additional therapeutic agent.

[0241] In another embodiment, the application relates to the use of an anti-TfR antibody or antigen binding fragment or conjugate thereof of the application in the manufacture or preparation of a medicament. In one embodiment, the medicament is for treatment of neurological disease or disorder. In a further embodiment, the medicament is for use in a method of treating neurological disease or disorder comprising administering to an individual having neurological disease or disorder an effective amount of the medicament.

[0242] Another general aspect of the application relates to a method of inducing antibody dependent phagocytosis (ADP) without stimulating secretion of a pro-inflammatory cytokine in a subject in need thereof, comprising administering to the subject a complex comprising a therapeutic antibody or antigen binding fragment thereof coupled to, preferably covalently conjugated to, the antigen-binding fragment thereof of an anti-TfR antibody binding fragment according to an embodiment of the application, wherein the therapeutic antibody or antigen binding fragment thereof does not have effector function. For example, the therapeutic antibody or antigen binding fragment thereof can comprise one or more amino acid modifications that reduces or eliminates the effector function, such as the ADCC or CDC, such as mutations that reduce or abolish the binding to Fc gamma receptor. Such mutations can be at positions L234, L235, D270, N297, E318, K320, K322, P331, and P329, such as one, two or three mutations of L234A, L235A and P331S, wherein the numbering of amino acid residues is according to the EU index as set forth in Kabat. In one embodiment, the therapeutic antibody or antigen binding fragment thereof binds specifically to tau aggregates.

[0243] In some embodiments, the method further comprises administering to the subject an effective amount of at least one additional therapeutic agent. In certain embodiments, an additional therapeutic agent is a therapeutic agent effective to treat the same or a different neurological disorder as the anti-TfR antibody or antigen binding fragment or conjugate thereof is being employed to treat. Exemplary additional therapeutic agents include, but are not limited to: the various neurological drugs described above, cholinesterase inhibitors (such as donepezil, galantamine, rovastigmine, and tacrine), NMDA receptor antagonists (such as memantine), amyloid beta peptide aggregation inhibitors, antioxidants, γ-secretase modulators, nerve growth factor (NGF) mimics or NGF gene therapy, PPARy agonists, HMS-CoA reductase inhibitors (statins), ampakines, calcium channel blockers, GABA receptor antagonists, glycogen synthase kinase inhibitors, intravenous immunoglobulin, muscarinic receptor agonists, nicrotinic receptor modulators, active or passive amyloid beta peptide immunization, phosphodiesterase inhibitors, serotonin receptor antagonists and anti-amyloid beta peptide antibodies. In certain embodiments, the at least one additional therapeutic agent is selected for its ability to mitigate one or more side effects of the neurological drug. The additional therapeutic agent can be administered in the same or separate formulations and administered together or separately with the anti-TfR antibody or antigen binding fragment or conjugate thereof. The anti-TfR antibody or antigen binding fragment or conjugate of the application can be administered prior to, simultaneously with, and/or following, the administration of the additional therapeutic agent and/or adjuvant. The anti-TfR antibody or antigen binding fragment or conjugate thereof of the application can also be used in combination with other interventional therapies such as, but not limited to, radiation therapy, behavioral therapy, or other therapies known in the art and appropriate for the neurological disorder to be treated or prevented.

[0244] The anti-TfR antibody or antigen binding fragment or conjugate thereof of the application (and any additional therapeutic agent) can be administered by any suitable means, including parenteral, intrapulmonary, and intranasal, and, if desired for local treatment, intralesional administration. Parenteral infusions include intramuscular, intravenous, intraarterial, intraperitoneal, or subcutaneous administration, depending in part on whether the administration is brief or chronic. Various dosing schedules including but not limited to single or multiple administrations over various time-points, bolus administration, and pulse infusion are contemplated herein.

[0245] For the prevention or treatment of a disease, the appropriate dosage of an anti-TfR antibody or antigen binding fragment or conjugate thereof of the application (when used alone or in combination with one or more other additional therapeutic agents) will depend on various factors, such as the type of disease to be treated, the type of antibody or conjugate, the severity and course of the disease, whether the antibody, antigen binding fragment or conjugate thereof is administered for preventive or therapeutic purposes, previous therapy, the patient's clinical history and response to the antibody, the physiological state of the subject (including, e.g., age, body weight, health), and the discretion of the attending physician. Treatment dosages are optimally titrated to optimize safety and efficacy. The antibody, antigen binding fragment or conjugate thereof is suitably administered to the patient at one time or over a series of treatments.

[0246] According to particular embodiments, a therapeutically effective amount refers to the amount of therapy which is sufficient to achieve one, two, three, four, or more of the following effects: (i) reduce or ameliorate the severity of the disease, disorder or condition to be treated or a symptom associated therewith; (ii) reduce the duration of the disease, disorder or condition to be treated, or a symptom associated therewith; (iii) prevent the progression of the disease, disorder or condition to be treated, or a symptom associated therewith; (iv) cause regression of the disease, disorder or condition to be treated, or a symptom associated therewith; (v) prevent the development or onset of the disease, disorder or condition to be treated, or a symptom associated therewith; (vi) prevent the recurrence of the disease, disorder or condition to be treated, or a symptom associated therewith; (vii) reduce hospitalization of a subject having the disease, disorder or condition to be treated, or a symptom associated therewith; (viii) reduce hospitalization length of a subject having the disease, disorder or condition to be treated, or a symptom associated therewith; (ix) increase the survival of a subject with the disease, disorder or condition to be treated, or a symptom associated therewith; (xi) inhibit or reduce the disease, disorder or condition to be treated, or a symptom associated therewith in a subject; and/or (xii) enhance or improve the prophylactic or therapeutic effect(s) of another therapy.

[0247] In another aspect, the application relates to an article of manufacture (such as a kit) containing materials useful for the treatment, prevention and/or diagnosis of the disorders described above is provided. The article of manufacture comprises a container and a label or package insert on or associated with the container. Suitable containers include, for example, bottles, vials, syringes, IV solution bags, etc. The containers can be formed from a variety of materials such as glass or plastic. The container holds a composition which is by itself or combined with another composition effective for treating, preventing and/or diagnosing the condition and may have a sterile access port (for example the container may be an intravenous solution bag or a vial having a stopper pierceable by a hypodermic injection needle). At least one active agent in the composition is an antibody, antigen binding fragment thereof or a conjugate of the application. The label or package insert indicates that the composition is used for treating the condition of choice. Moreover, the article of manufacture can include (a) a first container with a composition contained therein, wherein the composition comprises an antibody, antigen binding fragment thereof or a conjugate of the application; and (b) a second container with a composition contained therein, wherein the composition comprises a further cytotoxic or otherwise therapeutic agent. The article of manufacture in this embodiment of the invention can further include a package insert indicating that the compositions can be used to treat a particular condition. Optionally, the article of manufacture can further comprise a second (or third) container comprising a pharmaceutically acceptable buffer, such as bacteriostatic water for injection (BWFI), phosphate-buffered saline, Ringer's solution and dextrose solution. It can further include other materials desirable from a commercial and user standpoint, including other buffers, diluents, filters, needles, and syringes.

### EMBODIMENTS

[0248] The invention provides also the following non-limiting embodiments.

[0249] 1. An anti-TfR antibody or antigen-binding fragment thereof for delivering an agent to the brain of a subject in need thereof, wherein the anti-TfR antibody or antigen-binding fragment thereof binds to a transferrin receptor (TfR), preferably human TfR1, with a dissociation constant K_{D} of at least 1 nM at a neutral pH and an off-rate constant k_{d} of at least 10⁻⁴ sec⁻¹ at an acidic pH, preferably the pH 5.

[0250] 1a. The anti-TfR antibody or antigen-binding fragment thereof of embodiment 1, having a dissociation constant K_{D} of 1 nM to 500 nM, such as 1 nM, 10 nM, 50 nM, 100 nM, 200 nM, 300 nM, 400 nM, 500 nM, or any value in between, at the neutral pH.

[0251] 1b. The anti-TfR antibody or antigen-binding fragment thereof of embodiment 1 or 1a, having an off-rate constant k_{d} of 10⁻⁴ sec⁻¹ to 10¹ sec⁻¹, such as 10⁻⁴, 10⁻³, 10⁻², 10⁻¹ sec⁻¹ or any value in between, at the acidic pH.

[0252] 2. The anti-TfR antibody or antigen-binding fragment thereof of any one of embodiments 1 to 1b, having an off-rate constant k_{d} of 2×10⁻² to 2×10⁻⁴ sec⁻¹, preferably 2.0×10⁻³ sec⁻¹, at the neutral pH.

[0253] 2a. The anti-TfR antibody or antigen-binding fragment thereof of embodiment 2, wherein the off-rate constant k_{d} at the neutral pH is 2×10⁻² to 2×10⁻⁴ sec⁻¹, such as 2×10⁻², 1×10⁻², 9×10⁻³, 8×10⁻³, 7×10⁻³, 6×10⁻³, 5×10⁻³, 4×10⁻³, 3×10⁻³, 2×10⁻³, 1×10⁻³, 9×10⁻⁴, 8×10⁻⁴, 7×10⁻⁴, 6×10⁻⁴, 5×10⁴, 4×10⁻⁴, 3×10⁻⁴, 2×10⁻⁴ sec⁻¹, or any value in between.

[0254] 3. The anti-TfR antibody or antigen-binding fragment thereof of any one of embodiments 1 to 2a, comprising:
[0255] (1) a heavy chain variable region comprising heavy chain complementarity determining regions (HCDRs) HCDR1, HCDR2 and HCDR3, and a light chain variable region comprising light chain complementarity determining regions (LCDRs) LCDR1, LCDR2 and LCDR3, wherein the HCDR1, HCDR2, HCDR3, LCDR1, LCDR2 and LCDR3 have the amino acid sequences of:
[0256] i. SEQ ID NOs: 292, 293, 294, 295, 296, and 297, respectively;
[0257] ii. SEQ ID NOs: 279, 280, 281, 282, 283 and 284, respectively;
[0258] iii. SEQ ID NOs: 29, 30, 31, 32, 33 and 34, respectively;
[0259] iv. SEQ ID NOs: 57, 58, 59, 60, 61 and 62, respectively;
[0260] v. SEQ ID NOs: 85, 86, 87, 88, 89 and 90, respectively;
[0261] vi. SEQ ID NOs: 110, 111, 112, 113, 114 and 115, respectively;
[0262] vii. SEQ ID NOs: 135, 136, 137, 138, 139 and 140, respectively;
[0263] viii. SEQ ID NOs: 191, 192, 193, 194, 195 and 196, respectively;
[0264] ix. SEQ ID NOs: 244, 245, 246, 247, 248 and 249, respectively;
[0265] x. SEQ ID NOs: 263, 264, 265, 266, 267 and 268, respectively;
[0266] xi. SEQ ID NOs: 345, 346, 347, 348, 349 and 350, respectively;
[0267] xii. SEQ ID NOs: 355, 356, 357, 358, 359 and 360, respectively;
[0268] xiii. SEQ ID NOs: 365, 366, 367, 368, 369 and 370, respectively;
[0269] xiv. SEQ ID NOs: 375, 376, 377, 378, 379 and 380, respectively;
[0270] xv. SEQ ID NOs: 385, 386, 387, 388, 389 and 390, respectively;
[0271] xvi. SEQ ID NOs: 395, 396, 377, 398, 399 and 400, respectively;
[0272] xvii. SEQ ID NOs: 405, 406, 407, 408, 409 and 410, respectively;
[0273] xviii. SEQ ID NOs: 415, 416, 417, 418, 419 and 420, respectively;
[0274] xix. SEQ ID NOs: 425, 426, 427, 428, 429 and 430, respectively;
[0275] xx. SEQ ID NOs: 435, 436, 437, 438, 439 and 440, respectively;
[0276] xxi. SEQ ID NOs: 445, 446, 447, 448, 449 and 450, respectively;
[0277] xxii. SEQ ID NOs: 455, 456, 457, 458, 459 and 460, respectively;
[0278] xxiii. SEQ ID NOs: 465, 466, 467, 468, 469 and 470, respectively;
[0279] xxiv. SEQ ID NOs: 475, 476, 477, 478, 479 and 480, respectively;
[0280] xxv. SEQ ID NOs: 485, 486, 487, 488, 489 and 490, respectively;
[0281] xxvi. SEQ ID NOs: 495, 496, 497, 498, 499 and 500, respectively;
[0282] xxvii. SEQ ID NOs: 505, 506, 507, 508, 509 and 510, respectively;
[0283] xxviii. SEQ ID NOs: 515, 516, 517, 518, 519 and 520, respectively;
[0284] xxix. SEQ ID NOs: 525, 526, 527, 528, 529 and 530, respectively;
[0285] xxx. SEQ ID NOs: 535, 536, 537, 538, 539 and 540, respectively; or
[0286] xxxi. SEQ ID NOs: 545, 546, 547, 548, 549 and 550, respectively; or
[0287] (2) a single variable domain on a heavy chain (VHH) comprising heavy chain complementarity determining regions (HCDRs) HCDR1, HCDR2 and HCDR3 having the amino acid sequences of:
[0288] i. SEQ ID NOs: 7, 8 and 9, respectively;
[0289] ii. SEQ ID NOs: 317, 318 and 319, respectively;
[0290] iii. SEQ ID NOs: 324, 325 and 326, respectively;
[0291] iv. SEQ ID NOs: 331, 332 and 333, respectively; or
[0292] v. SEQ ID NOs: 338, 339 and 340, respectively

[0293] 4. The antibody or antigen-binding fragment thereof of embodiment 3, being a VHH fragment comprising an amino acid sequence having at least 80%, such as at least 85%, 90%, 95% or 100%, sequence identity to SEQ ID NO: 6, 316, 323, 330, or 337.

[0294] 4a. The antibody or antigen-binding fragment thereof of embodiment 2, wherein the VHH fragment comprises the amino acid sequence of SEQ ID NO: 6, 316, 323, 330, or 337.

[0295] 5. The antibody or antigen-binding fragment thereof of embodiment 3, being a single-chain variable fragment (scFv) comprising the heavy chain variable region (VH) covalently linked to the light chain variable region (VL) via a linker, such as a peptide linker having about 10 to about 25 amino acids in length.

[0296] 5a. The antibody or antigen-binding fragment thereof of embodiment 5, wherein the VH is linked to the amino-terminus of the VL via the linker in the scFv.

[0297] 5b. The antibody or antigen-binding fragment thereof of embodiment 5, wherein the VH is linked to the carboxy-terminus of the VL via the linker in the scFv.

[0298] 5c. The antibody or antigen-binding fragment thereof of embodiment 5a or 5b, wherein the linker comprises one or more of Gly and Ser, with one or more interspersed Glu, Thr and Lys residues, preferably the linker has the amino acid sequence of SEQ ID NO: 314.

[0299] 5d. The antibody or antigen-binding fragment thereof of embodiment 5c, wherein the scFv comprises the HCDR1, HCDR2, HCDR3, LCDR1, LCDR2 and LCDR3 having the amino acid sequences of SEQ ID NOs: 279, 280, 281, 282, 283 and 284, respectively, or SEQ ID NOs: 292, 293, 294, 295, 296, and 297, respectively;

[0300] 5e. The antibody or antigen-binding fragment thereof of embodiment 5, wherein the scFv comprises an amino acid sequence having at least 80%, such as at least 85%, 90%, 95% or 100%, sequence identity to the amino acid sequences of SEQ ID NO: 278, 291, 28, 56, 84, 109, 134, 162, 190, 218, 243, 262, 344, 354, 364, 374, 384, 394, 404, 414, 424, 434, 444, 454, 464, 474, 484, 494, 504, 514, 524, 534 or 544.

[0301] 5f. The antibody or antigen-binding fragment thereof of embodiment 5e, wherein the scFv comprises the amino acid sequence of SEQ ID NO: 278, 291, 28, 56, 84, 109, 134, 162, 190, 218, 243, 262, 344, 354, 364, 374, 384, 394, 404, 414, 424, 434, 444, 454, 464, 474, 484, 494, 504, 514, 524, 534 or 544.

[0302] 5g. The antibody or antigen-binding fragment thereof of embodiment 5e, wherein the scFv comprises the amino acid sequence of SEQ ID NO: 278, 291, 162 or 218.

[0303] 5h. An antibody or antigen-binding fragment thereof that binds to the same epitope of the antibody or antigen-binding fragment thereof of any one of embodiments 3 to 5g.

[0304] 5i. An antibody or antigen-binding fragment thereof that competes with the antibody or antigen-binding fragment thereof of any one of embodiments 3 to 5g in binding to the TfR.

[0305] 5j. The antibody or antigen-binding fragment thereof of any one of embodiments 3 to 5i, binding to human TfR1 with a dissociation constant K_{D} of 1 to 500 nM, such as 1 nM, 10 nM, 50 nM, 100 nM, 200 nM, 300 nM, 400 nM, 500 nM, or any value in between, at pH7.4.

[0306] 5k. The antibody or antigen-binding fragment thereof of any one of embodiments 3 to 5j, binding to human TfR1 with an off-rate constant k_{d} of 10⁴ to 10⁻¹ sec⁻¹, such as 104, 10′, 10⁻², 10⁻¹ sec⁻¹ or any value in between, at pH5.

[0307] 6. A complex comprising the antibody or antigen-binding fragment thereof of any one of embodiments 1 to 5k coupled to a therapeutic or diagnostic agent.

[0308] 6a. The complex of embodiment 6, wherein the antibody or antigen-binding fragment thereof is coupled to the therapeutic or diagnostic agent noncovalently.

[0309] 6b. The complex of embodiment 6, wherein the antibody or antigen-binding fragment thereof is coupled to the therapeutic or diagnostic agent covalently to form a conjugate.

[0310] 6c. The complex of embodiment 6, wherein the antibody or antigen-binding fragment thereof is covalently linked to the therapeutic or diagnostic agent via a linker.

[0311] 6d. The complex of embodiment 6c, wherein the linker is a non-peptide linker, such as polyethylene glycol, polypropylene glycol, copolymer of ethylene glycol and propylene glycol, polyoxyethylated polyol, polyvinyl alcohol, polysaccharides, dextran, polyvinyl ether, biodegradable polymer, polymerized lipid, chitins, and hyaluronic acid, or derivatives thereof, or combinations thereof.

[0312] 6e. The complex of embodiment 6c, wherein the linker is a peptide linker, such as a peptide chain consisting of 1 to 50 amino acids linked by peptide bonds or a derivative thereof.

[0313] 6f. The complex of any one of embodiments 6 to 6e, wherein the antibody or antigen-binding fragment thereof is coupled to the diagnostic agent for detecting a neurological disorder, preferably, the diagnostic agent is an agent for positron emission tomography (PET), or an agent for IDK.

[0314] 6g. The complex of any one of embodiments 6 to 6e, wherein the antibody or antigen-binding fragment thereof is coupled to a therapeutic agent, preferably a neurological disorder drug.

[0315] 6h. The complex of embodiment 6g, wherein the neurological disorder drug is selected from the group consisting of small molecule compounds, antibodies, peptides, proteins, natural ligands of one or more CNS target(s), modified versions of natural ligands of one or more CNS target(s), aptamers, inhibitory nucleic acids (i.e., small inhibitory RNAs (siRNA) and short hairpin RNAs (shRNA)), ribozymes, and active fragments of the foregoing.

[0316] 6i. The complex of embodiment 6g, wherein the neurological disorder drug is selected from the group consisting of antibodies, aptamers, proteins, peptides, inhibitory nucleic acids and small molecules and active fragments of any of the foregoing that either are themselves or specifically recognize and/or act upon (i.e., inhibit, activate, or detect) a CNS antigen or target molecule such as, but not limited to, amyloid precursor protein or portions thereof, amyloid beta, beta-secretase, gamma-secretase, tau, alpha-synuclein, parkin, huntingtin, DR6, presenilin, ApoE, glioma or other CNS cancer markers, and neurotrophins Non-limiting examples of neurological disorder drugs and the corresponding disorders they may be used to treat: Brain-derived neurotrophic factor (BDNF), Chronic brain injury (Neurogenesis), Fibroblast growth factor 2 (FGF-2), Anti-Epidermal Growth Factor Receptor Brain cancer, (EGFR)-antibody, Glial cell-line derived neural factor Parkinson's disease, (GDNF), Brain-derived neurotrophic factor (BDNF) Amyotrophic lateral sclerosis, depression, Lysosomal enzyme Lysosomal storage disorders of the brain, Ciliary neurotrophic factor (CNTF) Amyotrophic lateral sclerosis, Neuregulin-1 Schizophrenia, Anti-HER2 antibody (e.g. trastuzumab) Brain metastasis from HER2-positive cancer.

[0317] 7. The complex of embodiment 6, being a multi-specific antibody comprising a first antigen binding region which binds a TfR and a second antigen binding region which binds a brain antigen (or brain target), wherein the first antigen binding region comprises the antigen-binding fragment thereof of any one of embodiments 1 to 5k.

[0318] 7a. The multi-specific antibody of embodiment 7, wherein the brain target is selected from the group consisting of beta-secretase 1 (BACE1), amyloid beta (Abeta), epidermal growth factor receptor (EGFR), human epidermal growth factor receptor 2 (HER2), Tau, apolipoprotein E4 (ApoE4), alpha-synuclein, CD20, huntingtin, prion protein (PrP), leucine rich repeat kinase 2 (LRRK2), parkin, presenilin 1, presenilin 2, gamma secretase, death receptor 6 (DR6), amyloid precursor protein (APP), p75 neurotrophin receptor (p75NTR), and caspase 6.

[0319] 7b. The multi-specific antibody of embodiment 7a, wherein the second antigen binding region binds a BACE1 or Tau.

[0320] 7c. The multi-specific antibody of any one of embodiments 7 to 7b, wherein the first antigen binding region is covalently linked to a first Fc, and the second antigen binding region is covalently linked to a second Fc.

[0321] 7d. The multi-specific antibody of embodiment 7c, wherein the first Fc is different from the second Fc in one or more amino acid residues to facilitate the formation of a heterodimer between the first Fc and the second Fc.

[0322] 8. The multi-specific antibody of any one of embodiments 7 to 7d, being a fusion construct comprising the antibody or antigen-binding fragment thereof of any one of embodiments 1 to 5k covalently linked a second antibody or antigen binding fragment thereof that binds the brain antigen (or brain target).

[0323] 8a. The fusion construct of embodiment 8, wherein the antibody or antigen-binding fragment thereof of any one of embodiments 1 to 5k is covalently linked, preferably via a linker, to the amino-terminus of a heavy chain of the second antibody or antigen binding fragment thereof.

[0324] 8b. The fusion construct of embodiment 8, wherein the antibody or antigen-binding fragment thereof of any one of embodiments 1 to 5k is covalently linked, preferably via a linker, to the amino-terminus of a light chain of the second antibody or antigen binding fragment thereof.

[0325] 8c. The fusion construct of embodiment 8, wherein the antibody or antigen-binding fragment thereof of any one of embodiments 1 to 5k is covalently linked, preferably via a linker, to the carboxy-terminus of a light chain of the second antibody or antigen binding fragment thereof.

[0326] 8d. The fusion construct of embodiment 8, wherein the antibody or antigen-binding fragment thereof of any one of embodiments 1 to 5k is covalently linked, preferably via a linker, to the carboxy-terminus of a heavy chain of the second antibody or antigen binding fragment thereof.

[0327] 9. The fusion construct of embodiment 8d, wherein the antibody or antigen-binding fragment thereof any one of embodiments 1 to 5k is covalently linked, via a linker, to the carboxy terminus of only one of the two heavy chains of the second antibody or antigen binding fragment.

[0328] 9a. The fusion construct of any one of embodiments 8a to 9, wherein the linker is a peptide linker comprising one or more of Gly and Ser, preferably the linker has the amino acid sequence of SEQ ID NO: 312 or SEQ ID NO: 313.

[0329] 9b. The fusion construct of any one of embodiments 8 to 9a, wherein the second antibody or antigen binding fragment thereof comprise a first Fc in its first heavy chain and a second Fc in its second heavy chain, and the first Fc is different from the second Fc in one or more amino acid residues to facilitate the formation of a heterodimer between the first Fc and the second Fc.

[0330] 9c. The multi-specific antibody of embodiment 7d or the fusion construct of embodiment 9b, wherein the first Fc contains one or more “knob” mutations and the second Fc contains more or more corresponding “hole” mutations, or vice versa (see, e.g., U.S. Pat. No. 5,731,168, Ridgway et al., Protein Eng., 9(7): 617-621, 1996, for the “knob-in-hole” mutations, which are incorporated herein by reference in its entirety), preferably a Knob mutation of T366W and a hole mutation of T366S, L368A or Y407V.

[0331] 9d. The multi-specific antibody of embodiment 7d or the fusion construct of embodiment 9b, wherein each of the first Fc and the second Fc comprises a modified heterodimeric CH3 domain as compared to a wild-type CH3 domain polypeptide, preferably, the modified heterodimeric CH3 domain comprises one or more mutations as described in U.S. Pat. No. 10,457,742.

[0332] 9e. The multi-specific antibody or fusion construct of embodiment 9d, wherein the modified heterodimeric CH3 domain of the first Fc comprises amino acid modifications at positions T350, L351, F405, and Y407, and the modified heterodimeric CH3 domain of the second Fc comprises amino acid modifications at positions T350, T366, K392 and T394.

[0333] 9f. The multi-specific antibody or fusion construct of embodiment 9e, wherein the amino acid modification at position T350 is T350V, T350I, T350L or T350M; the amino acid modification at position L351 is L351Y; the amino acid modification at position F405 is F405A, F405V, F405T or F405S; the amino acid modification at position Y407 is Y407V, Y407A or Y407I; the amino acid modification at position T366 is T366L, T366I, T366V or T366M, the amino acid modification at position K392 is K392F, K392L or K392M, and the amino acid modification at position T394 is T394W.

[0334] 9g. The multi-specific antibody or fusion construct of embodiment 9e, wherein the modified heterodimeric CH3 domain of the first Fc comprises mutations T350V, L351Y, F405A and Y407V, and the modified heterodimeric CH3 domain of the second Fc comprises mutations T350V, T366L, K392L and T394W, or vice versa.

[0335] 10. The multi-specific antibody or fusion construct of any one of embodiments 7-9g, wherein the Fc region of the multi-specific antibody or fusion construct further comprises substitutions that alter (increase or diminish), preferably increase, the binding of the second antibody or antigen binding fragment thereof to neonatal Fc receptor (FcRn).

[0336] 10a. The multi-specific antibody or fusion construct of embodiment 10, wherein the second antibody or antigen binding fragment thereof comprises one or more mutations in the Fc domain that enhance binding of the fusion to the neonatal Fc receptor (RcRn).

[0337] 10b. The multi-specific antibody or fusion construct of embodiment 10 or 10a, wherein the one or more mutations enhance the binding at an acidic pH.

[0338] 10c. The multi-specific antibody or fusion construct of embodiment 10b, wherein the Fc of the second antibody has the M252Y/S254T/T256E (YTE) mutations, wherein the numbering of amino acid residues is according to the EU index as set forth in Kabat.

[0339] 11. The multi-specific antibody or fusion construct of any one of embodiments 7-10c, wherein the Fc region of the multi-specific antibody or fusion construct further comprises substitutions that alter (increase or diminish), preferably reduces or eliminates the effector function.

[0340] 11a. The multi-specific antibody or fusion construct of embodiment 11, wherein the second antibody or antigen binding fragment thereof comprises one or more mutations in the Fc domain that reduce or eliminate the effector function, such antibody dependent cellular cytotoxicity (ADCC) or complement dependent cytotoxicity (CDC).

[0341] 11b. The multi-specific antibody or fusion construct of embodiment 11a, wherein the Fc of the second antibody has one or more amino acid modifications at positions L234, L235, D270, N297, E318, K320, K322, P331, and P329, wherein the numbering of amino acid residues is according to the EU index as set forth in Kabat.

[0342] 11c. The multi-specific antibody or fusion construct of embodiment 11b, wherein the Fc of the second antibody has one, two or three mutations of L234A, L235A and P331 S (the AAS mutations).

[0343] 12. The multi-specific antibody or fusion construct of any one of embodiments 7 to 11c, wherein the first antigen binding region or the antibody or antigen-binding fragment thereof does not contain cysteine.

[0344] 13. The multi-specific antibody or fusion construct of embodiments 7 to 12, wherein the second antigen binding region or the second antibody or antigen binding fragment thereof binds Tau, preferably comprising the HCDR1, HCDR2, HCDR3, LCDR1, LCDR2 and LCDR3 having the amino acid sequences of SEQ ID Nos: 554 to 559, respectively, preferably, the second antibody is a monoclonal antibody comprising a heavy chain having the amino acid sequence of SEQ ID NO: 310 and a light chain having the amino acid sequence of SEQ ID NO: 311.

[0345] 14. The fusion construct of embodiment 9, comprising:
[0346] (1) a first heavy chain having an amino acid sequence that is at least 80%, such as at least 85%, 90%, 95% or 100%, identical to an amino acid sequence selected from the group consisting of SEQ ID NOs: 301, 304, 307, 285, 288, 298, 10, 13, 16, 19, 22, 25, 35, 38, 41, 44, 47, 50, 53, 63, 66, 69, 72, 75, 78, 81, 91, 94, 97, 100, 103, 106, 116,119, 122, 125, 128, 131, 141, 144, 147, 150, 153, 156, 159, 169,172, 175, 178, 181, 184, 187, 197, 200, 203, 206, 209, 212, 215, 225, 228, 231, 234, 237, 240, 250, 252, 256, 259, 269, 272, 275, 320, 327, 334, 341, 351, 361, 371, 381, 391, 401,411, 421, 431, 441, 451, 461 and 471;
[0347] (2) two light chains each independently having an amino acid sequence that is at least 80%, such as at least 85%, 90%, 95% or 100%, identical to an amino acid sequence selected from the group consisting of 302, 305, 308, 286, 289, 299, 11, 14, 17, 20, 23, 26, 36, 39, 42, 45, 48, 51, 54, 64, 67, 70, 73, 76, 79, 82, 92, 95, 98, 101, 104, 107, 117,120, 123, 126, 129, 132, 142, 145, 148,151, 154, 157, 160, 170,173, 176, 179, 182, 185, 188, 198, 201, 204, 207, 210, 213, 216, 226, 229, 232, 235, 238, 241, 251, 253, 257, 260, 270, 273 276, 321, 328, 335, 342, 352, 362, 372, 382, 392, 402, 412, 422, 432, 442, 452, 462 and 472, respectively; and
[0348] (3) a second heavy chain having an amino acid sequence that is at least 80%, such as at least 85%, 90%, 95% or 100%, identical to an amino acid sequence selected from the group consisting of 303, 306, 309, 287, 290, 300, 12, 15, 18, 21, 24, 27, 37, 40, 43, 46, 49, 52, 55, 65, 68, 71, 74, 77, 80, 83, 93, 96, 99, 102, 105, 108, 118, 121, 124, 127, 130, 133, 143, 146, 149, 152, 155, 158, 161, 171, 174, 177, 180, 183, 186, 189, 199, 202, 205, 208, 211, 214, 217, 227, 230, 233, 236, 239, 242, 252, 254, 258, 261, 271, 274, 277, 322, 329, 336, 343, 353, 363, 373, 383, 393, 403, 413, 423, 433, 443, 453, 463 and 473, respectively.

[0349] 14a. The fusion construct of embodiment 14, wherein the two light chains have an identical amino acid sequence.

[0350] 14b. The fusion construct of embodiment 14, wherein the two light chains have different amino acid sequences.

[0351] 14c. The fusion construct of embodiment 14, wherein:
[0352] (1) the first heavy chain has the amino acid sequence selected from the group consisting of SEQ ID NOs: 301, 304, 307, 285, 288, 298, 10, 13, 16, 19, 22, 25, 35, 38, 41, 44, 47, 50, 53, 63, 66, 69, 72, 75, 78, 81, 91, 94, 97, 100, 103, 106, 116, 119, 122, 125, 128, 131, 141, 144, 147, 150, 153, 156, 159, 169, 172, 175, 178, 181, 184, 187, 197, 200, 203, 206, 209, 212, 215, 225, 228, 231, 234, 237, 240, 250, 252, 256, 259, 269, 272, 275, 320, 327, 334, 341, 351, 361, 371, 381, 391, 401,411, 421, 431, 441, 451, 461 and 471;
[0353] (2) the two light chains each have the amino acid sequence selected from the group consisting of 302, 305, 308, 286, 289, 299, 11, 14, 17, 20, 23, 26, 36, 39, 42, 45, 48, 51, 54, 64, 67, 70, 73, 76, 79, 82, 92, 95, 98, 101, 104, 107, 117, 120, 123, 126, 129, 132, 142, 145, 148, 151, 154, 157, 160, 170, 173, 176, 179, 182, 185, 188, 198, 201, 204, 207, 210, 213, 216, 226, 229, 232, 235, 238, 241, 251, 253, 257, 260, 270, 273 276, 321, 328, 335, 342, 352, 362, 372, 382, 392, 402, 412, 422, 432, 442, 452, 462 and 472, respectively; and
[0354] (3) the second heavy chain has the amino acid sequence selected from the group consisting of 303, 306, 309, 287, 290, 300, 12, 15, 18, 21, 24, 27, 37, 40, 43, 46, 49, 52, 55, 65, 68, 71, 74, 77, 80, 83, 93, 96, 99, 102, 105, 108, 118, 121, 124, 127, 130, 133, 143, 146, 149, 152, 155, 158, 161, 171, 174, 177, 180, 183, 186, 189, 199, 202, 205, 208, 211, 214, 217, 227, 230, 233, 236, 239, 242, 252, 254, 258, 261, 271, 274, 277, 322, 329, 336, 343, 353, 363, 373, 383, 393, 403,413, 423, 433, 443, 453, 463 and 473, respectively.

[0355] 14d. The fusion construct of embodiment 14, wherein:
[0356] (1) the first heavy chain has the amino acid sequence of SEQ ID NOs: 285, 288, 298, or 301;
[0357] (2) the two light chains each have the amino acid sequence of 286, 289, 299 or 302, respectively; and
[0358] (3) the second heavy chain has the amino acid sequence of 287, 290, 300 or 303, respectively.

[0359] 15. An isolated nucleic acid encoding the antibody or antigen-binding fragment of any one of embodiments 1-5k or the fusion construct of any one of embodiments 7-14d.

[0360] 16. A vector comprising the isolated nucleic acid of claim 15.

[0361] 17. A host cell comprising the nucleic acid of embodiment 15 or the vector of embodiment 16.

[0362] 18. A method of producing the antibody or antigen-binding fragment of any one of embodiments 1-5k or the fusion construct of any one of embodiments 7-14d, comprising culturing a cell comprising a nucleic acid encoding the antibody or antigen-binding fragment or the fusion construct under conditions to produce the antibody or antigen-binding fragment the fusion construct, and recovering the antibody or antigen-binding fragment, the conjugate or the fusion construct from the cell or cell culture.

[0363] 19. A pharmaceutical composition comprising the antibody or antigen-binding fragment of any one of embodiments 1-5k, the complex of any one of embodiments 6-6i, or the multi-specific antibody or fusion construct of any one of embodiments 7-14d, and a pharmaceutically acceptable carrier.

[0364] 20. A method of treating or detecting a neurological disorder in a subject in need thereof, comprising administering to the subject an effective amount of the antibody or antigen-binding fragment of any one of embodiments 1-5k, the complex of any one of embodiments 6-6i, or the multi-specific antibody or fusion construct of any one of embodiments 7-14d, or the pharmaceutical composition of embodiment 19.

[0365] 21. A method of increasing delivery of a therapeutic or diagnostic agent to the brain of a subject in need thereof, comprising administering to the subject a conjugate comprising the therapeutic or diagnostic agent coupled to the antibody or antigen-binding fragment thereof of any one of embodiments 1-5k.

[0366] 22. A method of transporting a therapeutic or diagnostic agent across the blood-brain barrier (BBB) comprising exposing an anti-TfR antibody or antigen binding fragment thereof of any one of embodiments 1-5k coupled to the therapeutic or diagnostic agent to the blood-brain barrier such that the antibody or antigen binding fragment thereof transports the agent coupled thereto across the blood-brain barrier.

[0367] 23. A method of delivering a therapeutic or diagnostic agent across the blood-brain barrier (BBB) of a subject in need thereof, comprising administering to the subject a complex comprising the therapeutic or diagnostic agent coupled to, preferably covalently conjugated to, the antibody or antigen-binding fragment thereof of any one of embodiments 1 to 5.

[0368] 24. A method of inducing antibody dependent phagocytosis (ADP) without stimulating secretion of a pro-inflammatory cytokine in a subject in need thereof, comprising administering to the subject a complex comprising a therapeutic antibody or antigen binding fragment thereof coupled to, preferably covalently conjugated to, the antigen-binding fragment thereof of any one of embodiments 1 to 5, wherein the therapeutic antibody or antigen binding fragment thereof comprises one or more mutations in the Fc domain that reduce or eliminate the effector function, such antibody dependent cellular cytotoxicity (ADCC) or complement dependent cytotoxicity (CDC).

[0369] 24a. The method of embodiment 23, wherein the therapeutic antibody or antigen binding fragment thereof comprises one or more amino acid modifications at positions L234, L235, D270, N297, E318, K320, K322, P331, and P329, wherein the numbering of amino acid residues is according to the EU index as set forth in Kabat.

[0370] 24b. The method of embodiment 24a, wherein the therapeutic antibody or antigen binding fragment thereof comprises one, two or three mutations of L234A, L235A and P331S.

[0371] 25. The method of any one of embodiments 20-24b, wherein the subject is in need of a treatment of a neurological disorder, preferably the neurological disorder is selected from the group consisting of neurodegenerative diseases (such as Lewy body disease, postpoliomyelitis syndrome, Shy-Draeger syndrome, olivopontocerebellar atrophy, Parkinson's disease, multiple system atrophy, striatonigral degeneration, spinocerebellar ataxia, spinal muscular atrophy), tauopathies (such as Alzheimer disease and supranuclear palsy), prion diseases (such as bovine spongiform encephalopathy, scrapie, Creutz-feldt-Jakob syndrome, kuru, Gerstmann-Straussler-Scheinker disease, chronic wasting disease, and fatal familial insomnia), bulbar palsy, motor neuron disease, and nervous system heterodegenerative disorders (such as Canavan disease, Huntington's disease, neuronal ceroid-lipofuscinosis, Alexander's disease, Tourette's syndrome, Menkes kinky hair syndrome, Cockayne syndrome, Halervorden-Spatz syndrome, lafora disease, Rett syndrome, hepatolenticular degeneration, Lesch-Nyhan syndrome, and Unverricht-Lundborg syndrome), dementia (such as Pick's disease, and spinocerebellar ataxia), and cancer of the CNS and/or brain (such as brain metastases resulting from cancer elsewhere in the body).

[0372] 26. The method of any one of embodiments 20 to 25, wherein the antibody or antigen-binding fragment thereof, the complex, the multispecific antibody, the fusion construct or the pharmaceutical composition is administered intravenously.

[0373] 27. The method of any one of embodiments 21 to 26, wherein the therapeutic agent or therapeutic antibody or antigen binding fragment thereof is a neurological disorder drug.

[0374] 28. The method of any one of embodiments 21 to 23, wherein the agent is an imaging agent or an agent for detecting a neurological disorder.

[0375] 29. The method of any one of embodiments 20-28, wherein the anti-TfR antibody or antigen binding fragment thereof, complex or fusion thereof, does not impair the binding of the TfR to its native ligand transferrin.

[0376] 30. The method of any one of embodiments 20 to 29, wherein the administration reduces Fc-mediated effector function.

[0377] 31. The method of any one of embodiments 21 to 30, wherein the administration does not induce rapid reticulocyte depletion.

[0378] 32. The method of embodiment 31, wherein the therapeutic antibody or antigen binding fragment thereof binds specifically to tau aggregates

[0379] 33. The method of any one of embodiments 20-32, wherein the subject is a primate, such as a human, more preferably a human having a neurological disorder.

[0380] 34. The method of embodiment 33, wherein the neurological disorder is selected from the group consisting of Alzheimer's disease (AD), stroke, dementia, muscular dystrophy (MD), multiple sclerosis (MS), amyotrophic lateral sclerosis (ALS), cystic fibrosis, Angelman's syndrome, Liddle syndrome, Parkinson's disease, Pick's disease, Paget's disease, cancer, and traumatic brain injury.

[0381] The following examples of the invention are to further illustrate the nature of the invention. It should be understood that the following examples do not limit the invention and the scope of the invention is to be determined by the appended claims.

### EXAMPLES

### Example 1

[0382] While the blood-brain barrier (BBB) prevents harmful substances from entering the brain and is essential for brain homeostasis, it presents a formidable obstacle for efficiently delivering drugs to the brain. Towards this end, a monoclonal antibody (mAb) brain shuttle platform was developed that penetrates the BBB and results in substantially higher brain concentrations than mAb alone.

### Antibody Generation (OMT Rats and Ablexis Mice)

[0383] OMT rats (OmniRat® from Ligand Pharmaceuticals) and Ablexis mice (Ablexis, LLC, San Diego, Calif.) were immunized with human (SEQ ID NO: 1), cyno (SEQ ID NO: 2) and marmoset (SEQ ID NO: 3) transferrin receptor (TfR) using repetitive immunizations multiple sites (RIMMS) protocols for 46 days (Ablexis), 49 days (OMT) or 50 days (OMT). Briefly, animals were repeatedly immunized at multiple subcutaneous sites proximal to regional draining lymph nodes. Serum titration (ELISA, enzyme-linked immunosorbent assay) was done at day 32 (OMT) or day 35 (Ablexis) and all animals show generally low to modest titers on human, cyno, and marmoset TfR, and no titers on the negative control. Lymph nodes were harvested from sera-positive rats and mice and fused to generate hybridomas.

[0384] Hybridomas were first screened by Meso Scale Discovery (MSD) or ELISA for binding to HEK293T huTfR (human transferrin receptor) expressing cells. All these hits were then tested in the confirmatory screen. In the confirmatory screen on fluorescence-activated cell sorting (FACS) MDCK-huTfR cells (Madin-Darby canine kidney cells) and pBECs (Microvascular Endothelial Cells, endogenous huTfR expression) were used and MDCK (parental) cells were used as negative cell line. After confirmatory screen, 616 TfR specific cell binders were identified (binding either/or/both huTfR expressing cells). From these 616 hits, 340 were binding on pBECS and MDCK-huTfR cells, 16 were binding on pBECS only and 260 were binding on MDCK-huTfR only.

[0385] The hybridomas that bound pBECs and MDCK-huTfR cells were then assessed for binding to rat TfR (SEQ ID NO: 4) and mouse TfR (SEQ ID NO: 5), checked for internalization in pBECs and competition with TfR. RNA lysates were prepared for those mAbs that were human, cyno and marmoset cross-reactive and internalized without competing for TfR. Antibody V-region sequencing data was obtained.

### Antibody Generation (Llama)

[0386] For the generation of single domain (VHH) antibodies against human TfR with cross reactivity to cyno, mouse and rat, two llamas were used for immunizations at Abcore (animal 1663L and 1663L) in project 452L. Antibody titers were determined by ELISA using TfR protein (1 μg/ml). Three bleeds from the two animals were tested and both animals showed good early titers.

[0387] Phage display was done at Abcore using their standard protocol. Two libraries were made: Library 1 (452L-1) from the second bleed of both animals, and Library 2 (452L-2) from the second and third bleed. Plasmid DNA from 12 random individual clones were sequenced and >80% contained VHH inserts with the correct reading frame. Both phage display libraries were screened with human TfR using standard Abcore panning procedures. Three rounds of panning with human TfR at 10 μg/ml were done. After panning, 94 individual clones were screened by phage ELISA for specific binding to protease-activated receptor 1 (Par1) N-terminal domain and non-specific binding to BSA (bovine serum albumin). Cross reactivity with cyno, mouse, and rat TfR was measured. 94 clones were selected for sequence analysis.

### Phage Antibody Generation

[0388] Phage libraries were panned against biotinylated huTfR, complexed with transferrin. The biotinylated complex was captured on streptavidin magnetic beads (Dynal) and exposed to the de novo pIX Fab libraries which were pre-incubated with transferrin protein at a final concentration of 100 nM (round 1 and 2) or 50 nM (round 3 and 4). Non-specific phages were washed away in PBS-Tween and bound phages were recovered by infection of MC1061F′ E. coli cells. Phages were amplified from these cells overnight and panning was repeated for a total of four rounds. Following four rounds of biopanning, monoclonal Fabs were screened for binding to human transferrin receptor in an ELISA. Clones that demonstrated binding to transferrin receptor were sequenced in the heavy and light chain variable regions.

[0389] Examples of TfR antibodies or antigen binding fragments of the invention are summarized in Table 1a below.

[0390] The binding affinities (KD, kon or ka and koff or kdis or kd) of the anti-TfR mAbs, as part of the tripod fusion constructs (BBBB constructs) described in more detail below, to TfR at neutral pH (7.4) and acidic pH (5) were measured using the following biolayer interferometry method. The results are shown in Table 1b below.

TABLE 1a

| Name | Sequence | HCDR1 | HCDR2 | HCDR3 | LCDR1 | LCDR2 | LCDR3 |
|---|---|---|---|---|---|---|---|
| TfR1 | SEQ ID | SEQ ID NO: 7 | SEQ ID NO: 8 | SEQ ID NO: 9 | | | |
| (VHH) | NO: 6 | GLTFSNYA | IGGSGGTW | AADQRAGSYSS | | | |
| | | | | GWYTRSSDSLY | | | |
| TfR2 | SEQ ID | SEQ ID NO: 29 | SEQ ID NO: 30 | SEQ ID NO: 31 | SEQ ID NO: 32 | SEQ ID NO: 33 | SEQ ID NO: 34 |
| | NO: 28 | GFTFRNAW | IKRKIDGGT | TTDPSRIPVAGAFDY | QSVSSTY | GASSRAT | QQYGSSPYT |
| TfR3 | SEQ ID | SEQ ID NO: 57 | SEQ ID NO: 58 | SEQ ID NO: 59 | SEQ ID NO: 60 | SEQ ID NO: 61 | SEQ ID NO: 62 |
| | NO: 56 | GFTFSSYNMNW | SSISSSSSYI | AREGISAYDALNV | SSSNIGNNY | DNNKRPS | GTWDSSLSAVV |
| TfR4 | SEQ ID | SEQ ID NO: 85 | SEQ ID NO: 86 | SEQ ID NO: 87 | SEQ ID NO: 88 | SEQ ID NO: 89 | SEQ ID NO: 90 |
| | NO: 84 | GFTFSSYAMNW | SGISGSGVSTN | AKEDYDSSGYYPFDY | HKLGDKF | QDRKRPS | QTWYSSTVI |
| TfR5 | SEQ ID | SEQ ID NO: 110 | SEQ ID NO: 111 | SEQ ID NO: 112 | SEQ ID NO: 113 | SEQ ID NO: 114 | SEQ ID NO: 115 |
| | NO: 109 | GFTFSSDAMHW | AVIWYDGSNKY | ARDRQWLAFDY | SSDVGGYNF | EVSKRPS | SYRDSNNFDVL |
| TfR6 | SEQ ID | SEQ ID NO: 135 | SEQ ID NO: 136 | SEQ ID NO: 137 | SEQ ID NO: 138 | SEQ ID NO: 139 | SEQ ID NO: 140 |
| | NO: 134 | GFTFNNYVMNW | ISGSGGTT | AKEDDDSTGYYPFDY | KLGDKFV | QDSKRPS | QTWDRSTVV |
| TfR7 | SEQ ID | SEQ ID NO: 163 | SEQ ID NO: 164 | SEQ ID NO: 165 | SEQ ID NO: 166 | SEQ ID NO: 167 | SEQ ID NO: 168 |
| | NO: 162 | GFTFSSYAMNW | ISGSGGHT | AREGYDSSGYNPFDY | KLGDKYA | QDSKRPS | QAWDSSTVV |
| TfR8 | SEQ ID | SEQ ID NO: 191 | SEQ ID NO: 192 | SEQ ID NO: 193 | SEQ ID NO: 194 | SEQ ID NO: 195 | SEQ ID NO: 196 |
| | NO: 190 | GGSISSTSYY | IYYSGNT | ARHDWYGGSYGWFDP | SLRSYY | AKNNRPS | NSRDSSGNHMV |
| TfR9 | SEQ ID | SEQ ID NO: 219 | SEQ ID NO: 220 | SEQ ID NO: 221 | SEQ ID NO: 222 | SEQ ID NO: 223 | SEQ ID NO: 224 |
| | NO: 218 | GGSFSGYY | FIHSGST | ARGSMDSSGFYSFDF | KLGDKF | QDRKRP | QTWYSSTVI |
| TfR10 | SEQ ID | SEQ ID NO: 244 | SEQ ID NO: 245 | SEQ ID NO: 246 | SEQ ID NO: 247 | SEQ ID NO: 248 | SEQ ID NO: 249 |
| | NO: 243 | GYSFTSYW | IDPSDSYT | ARMYKGRGHLFDY | QSVSKA | AASNRAT | QQYYRAPYT |
| TfR11 | SEQ ID | SEQ ID NO: 263 | SEQ ID NO: 264 | SEQ ID NO: 265 | SEQ ID NO: 266 | SEQ ID NO: 267 | SEQ ID NO: 268 |
| | NO: 262 | GYSFTSYW | IDPSDSYT | ARMYKGHGHLFDY | QSVSKA | AASNRAT | QQYYRAPYT |
| TfR12 | SEQ ID | SEQ ID NO: 279 | SEQ ID NO: 280 | SEQ ID NO: 281 | SEQ ID NO: 282 | SEQ ID NO: 283 | SEQ ID NO: 284 |
| | NO: 278 | GGSFSGYY | FIHSGST | ARGSMDSSGFYSFDF | KLGDKF | QDRKRP | QTWYSSTVI |
| TfR13 | SEQ ID | SEQ ID NO: 292 | SEQ ID NO: 293 | SEQ ID NO: 294 | SEQ ID NO: 295 | SEQ ID NO: 296 | SEQ ID NO: 297 |
| | NO: 291 | GFTFSSYAMNW | ISGSGGHT | AREGYDSSGYNPFDY | KLGDKYA | QDSKRPS | QAWDSSTVV |
| TfR14 | SEQ ID | SEQ ID NO: 317 | SEQ ID NO: 318 | SEQ ID NO: 319 | | | |
| (VHH) | NO: 316 | GLTFSNYA | IGGSGGTW | AADQRAGSYSSGWYTRS | | | |
| | | | | SDSLY | | | |
| TfR15 | SEQ ID | SEQ ID NO: 324 | SEQ ID NO: 325 | SEQ ID NO: 326 | | | |
| (VHH) | NO: 323 | GLTFSSYV | INGDGKF | ASDQRAGSLSSGWYSRR | | | |
| | | | | SYDTLY | | | |
| TfR16 | SEQ ID | SEQ ID NO: 331 | SEQ ID NO: 332 | SEQ ID NO: 333 | | | |
| (VHH) | NO: 330 | GFTFSSYA | ISWSGRW | VSDQRPGTLSSGWYSRS | | | |
| | | | | SDTLY | | | |
| TfR17 | SEQ ID | SEQ ID NO: 338 | SEQ ID NO: 339 | SEQ ID NO: 340 | | | |
| (VHH) | NO: 337 | VRISSANVV | SISGGDP | NYWNEGIRY | | | |
| TfR18 | SEQ ID | SEQ ID NO: 345 | SEQ ID NO: 346 | SEQ ID NO: 347 | SEQ ID NO: 348 | SEQ ID NO: 349 | SEQ ID NO: 350 |
| | NO: 344 | GFTFSSYW | INNIGNSR | ARAGNWDRDTFDI | QSVLYSSNNKIY | WAS | QQYYSTPYT |
| TfR19 | SEQ ID | SEQ ID NO: 355 | SEQ ID NO: 356 | SEQ ID NO: 357 | SEQ ID NO: 358 | SEQ ID NO: 359 | SEQ ID NO: 360 |
| | NO: 354 | GFTFSRYS | ISSSSTNI | ARDYMWKVFDY | QSLLDSDDGNIF | TLS | MQRIEFPIT |
| TfR20 | SEQ ID | SEQ ID NO: 365 | SEQ ID NO: 366 | SEQ ID NO: 367 | SEQ ID NO: 368 | SEQ ID NO: 369 | SEQ ID NO: 370 |
| | NO: 364 | GFIFSRYS | ISSSSTNI | AREYMWKVFDY | QSLLDSDDGNIF | TVS | MQRIEFPIT |
| TfR21 | SEQ ID | SEQ ID NO: 375 | SEQ ID NO: 376 | SEQ ID NO: 377 | SEQ ID NO: 378 | SEQ ID NO: 379 | SEQ ID NO: 380 |
| | NO: 374 | GFTFNSYD | IDTAGDT | ARDRLGYYGLDV | QSVSSSY | GAS | QQYDRSPIT |
| TfR22 | SEQ ID | SEQ ID NO: 385 | SEQ ID NO: 386 | SEQ ID NO: 387 | SEQ ID NO: 388 | SEQ ID NO: 389 | SEQ ID NO: 390 |
| | NO: 384 | GLTFNNHN | ISSSSSYK | ARDGIAAFDAFD | QSLVYSDGITY | KVS | MQGTHWPPT |
| TfR23 | SEQ ID | SEQ ID NO: 395 | SEQ ID NO: 396 | SEQ ID NO: 397 | SEQ ID NO: 398 | SEQ ID NO: 399 | SEQ ID NO: 400 |
| | NO: 394 | GFSLSTSGMS | IDWRDDK | AGIPGY | QNVATN | SAS | QQYNNYPFT |
| TfR24 | SEQ ID | SEQ ID NO: 405 | SEQ ID NO: 406 | SEQ ID NO: 407 | SEQ ID NO: 408 | SEQ ID NO: 409 | SEQ ID NO: 410 |
| | NO: 404 | GFTFSTYD | IWYDGTNR | ARDHGYTKFSDAFDF | QGISNY | AAS | LQHNSYPLT |
| TfR25 | SEQ ID | SEQ ID NO: 415 | SEQ ID NO: 416 | SEQ ID NO: 417 | SEQ ID NO: 418 | SEQ ID NO: 419 | SEQ ID NO 420 |
| | NO: 414 | GGSISAYY | IYASGTT | ARQETDTTGYDYFDY | KLGDKF | QDN | QTWDRSDAV |
| TfR26 | SEQ ID | SEQ ID NO: 425 | SEQ ID NO: 426 | SEQ ID NO: 427 | SEQ ID NO: 428 | SEQ ID NO: 429 | SEQ ID NO: 430 |
| | NO: 424 | GFTFSYYW | ISSDGSST | AREQRWLKSYYYGMDV | QGINSY | AAS | QQLNSYPLT |
| TfR27 | SEQ ID | SEQ ID NO: 435 | SEQ ID NO: 436 | SEQ ID NO: 437 | SEQ ID NO: 438 | SEQ ID NO: 439 | SEQ ID NO: 440 |
| | NO: 434 | AFRFSNFN | ITSTGTYI | ARQGIPAWDAFDL | QGISNY | ASS | LQHNSYPYT |
| TfR28 | SEQ ID | SEQ ID NO: 445 | SEQ ID NO: 446 | SEQ ID NO: 447 | SEQ ID NO: 448 | SEQ ID NO: 449 | SEQ ID NO: 450 |
| | NO: 444 | GFTFSSYN | ISSSSSYI | AREGISAYDALNV | QGISNF | AAS | LQHDSYPLT |
| TfR29 | SEQ ID | SEQ ID NO: 455 | SEQ ID NO: 456 | SEQ ID NO: 457 | SEQ ID NO: 458 | SEQ ID NO: 459 | SEQ ID NO: 460 |
| | NO: 454 | GFTFSSYN | ISSSSSYI | AREGISAYDALNV | SSNIGNNY | DNN | GTWDSSLSAVV |
| TfR30 | SEQ ID | SEQ ID NO: 465 | SEQ ID NO: 466 | SEQ ID NO: 467 | SEQ ID NO: 468 | SEQ ID NO: 469 | SEQ ID NO: 470 |
| | NO: 464 | GFTFSDYY | ISSSSVTI | AREDSDTSGYDPFDH | QSVSSN | GAS | QQYNNWPYT |
| TfR31 | SEQ ID | SEQ ID NO: 475 | SEQ ID NO: 476 | SEQ ID NO: 477 | SEQ ID NO: 478 | SEQ ID NO: 479 | SEQ ID NO: 480 |
| | NO: 474 | GFTLSDYD | INSGGNII | ARLYYDTSGYSSFDY | KLGDKF | QDR | QTWYSSTVI |
| TfR32 | SEQ ID | SEQ ID NO: 485 | SEQ ID NO: 486 | SEQ ID NO: 487 | SEQ ID NO: 488 | SEQ ID NO: 489 | SEQ ID NO: 490 |
| | NO: 484 | GFTFSSYA | ISAGGGST | AKREDDTTGYHYFDY | KLGDKF | QDT | QAWDRTTVV |
| TfR33 | SEQ ID | SEQ ID NO: 495 | SEQ ID NO: 496 | SEQ ID NO: 497 | SEQ ID NO: 498 | SEQ ID NO: 499 | SEQ ID NO: 500 |
| | NO: 494 | GYSISSSNWW | IYFSGST | ARKKGAYDYADAFDI | KIGSKS | DDS | QVWDSSSDHVV |
| TfR34 | SEQ ID | SEQ ID NO: 505 | SEQ ID NO: 506 | SEQ ID NO: 507 | SEQ ID NO: 508 | SEQ ID NO: 509 | SEQ ID NO: 510 |
| | NO: 504 | GDSITNSNFY | IFHGGNT | ARYVAAPDYFDY | NLGNKF | QDR | QAWDSSTVV |
| TfR35 | SEQ ID | SEQ ID NO: 515 | SEQ ID NO: 516 | SEQ ID NO: 517 | SEQ ID NO: 518 | SEQ ID NO: 519 | SEQ ID NO: 520 |
| | NO: 514 | GFTFSSYV | ISGSGGNT | AKLDYDTSGYDPFDF | KLGDKF | QDN | QAWVSSTAI |
| TfR36 | SEQ ID | SEQ ID NO: 525 | SEQ ID NO: 526 | SEQ ID NO: 527 | SEQ ID NO: 528 | SEQ ID NO: 529 | SEQ ID NO: 530 |
| | NO: 524 | GFTFSSDG | IWYDGSNK | ARDRQWLAFDY | SSDVGGYNF | EVS | SSYTDSNNFDVL |
| TfR37 | SEQ ID | SEQ ID NO: 535 | SEQ ID NO: 536 | SEQ ID NO: 537 | SEQ ID NO: 538 | SEQ ID NO: 539 | SEQ ID NO: 540 |
| | NO: 534 | GYTFTSYD | MNPNSGDT | MKMYYDTTGYHSFDS | RLGDRF | QDT | QTWVATTVV |
| TfR38 | SEQ ID | SEQ ID NO: 545 | SEQ ID NO: 546 | SEQ ID NO: 547 | SEQ ID NO: 548 | SEQ ID NO: 549 | SEQ ID NO: 550 |
| | NO: 544 | GGSISNSNYY | IFHGGNT | ARYVAAPDYFDY | KLGDKF | QDR | QAWDSSTVV |

TABLE 1b

| | | Neutral pH | | | Acidic pH | | |
|---|---|---|---|---|---|---|---|
| scFv | mAb | KD (M) | kon(1/Ms) | kdis(1/s) | KD (M) | kon(1/Ms) | kdis(1/s) |
| TfR14 | BBBB432 | 1.13E−08 | 1.67E+05 | 1.89E−03 | 1.44E−08 | 1.81E+05 | 2.59E−03 |
| SEQ ID: | SEQ ID: | | | | | | |
| 316 | 320, 321, 322 | | | | | | |
| TfR15 | BBBB435 | 1.52E−08 | 1.63E+05 | 2.46E−03 | 7.76E−09 | 1.83E+05 | 1.42E−03 |
| SEQ ID: | SEQ ID: | | | | | | |
| 323 | 327, 328, 329 | | | | | | |
| TfR16 | BBBB436 | 9.88E−09 | 1.50E+05 | 1.48E−03 | 6.87E−09 | 1.72E+05 | 1.18E−03 |
| SEQ ID: | SEQ ID: | | | | | | |
| 330 | 334, 335, 336 | | | | | | |
| TfR17 | BBBB439 | 3.65E−08 | 2.06E+05 | 7.51E−03 | 4.02E−08 | 2.01E+05 | 8.07E−03 |
| SEQ ID: | SEQ ID: | | | | | | |
| 337 | 341, 342, 343 | | | | | | |
| TfR18 | BBBB459 | 1.08E−09 | 1.24E+05 | 1.34E−04 | 9.44E−09 | 1.44E+05 | 1.35E−03 |
| SEQ ID: | SEQ ID: | | | | | | |
| 344 | 351, 352, 353 | | | | | | |
| TfR19 | BBBB464 | 5.29E−09 | 5.09E+04 | 2.69E−04 | 6.44E−08 | 5.29E+04 | 3.40E−03 |
| SEQ ID: | SEQ ID: | | | | | | |
| 354 | 361, 362, 363 | | | | | | |
| TfR20 | BBBB467 | 1.03E−08 | 6.95E+04 | 7.14E−04 | 9.25E−08 | 6.66E+04 | 6.16E−03 |
| SEQ ID: | SEQ ID: | | | | | | |
| 364 | 371, 372, 373 | | | | | | |
| TfR21 | BBBB476 | 6.98E−09 | 1.67E+05 | 1.17E−03 | 1.13E−08 | 1.79E+05 | 2.02E−03 |
| SEQ ID: | SEQ ID: | | | | | | |
| 374 | 381, 382, 383 | | | | | | |
| TfR22 | BBBB478 | 1.17E−09 | 1.03E+05 | 1.21E−04 | 3.58E−08 | 1.08E+05 | 3.85E−03 |
| SEQ ID: | SEQ ID: | | | | | | |
| 384 | 391, 392, 393 | | | | | | |
| TfR23 | BBBB479 | 2.68E−08 | 3.01E+04 | 8.05E−04 | 6.2E−08 | 3.94E+04 | 2.44E−03 |
| SEQ ID: | SEQ ID: | | | | | | |
| 394 | 401, 402, 403 | | | | | | |
| TfR24 | BBBB482 | 4.63E−09 | 2.68E+04 | 1.24E−04 | 2.78E−08 | 3.75E+04 | 1.04E−03 |
| SEQ ID: | SEQ ID: | | | | | | |
| 404 | 411, 412, 413 | | | | | | |
| TfR25 | BBBB486 | <1.0E−12 | 9.79E+04 | <1.0E−07 | 1.36E−08 | 1.14E+05 | 1.56E−03 |
| SEQ ID: | SEQ ID: | | | | | | |
| 414 | 421, 422, 423 | | | | | | |

Tripod construct design

| | | | | | | | |
|---|---|---|---|---|---|---|---|
| TfR26 | BBBB500 | 8.72E−09 | 6.96E+04 | 6.07E−04 | 2.62E−08 | 8.03E+04 | 2.11E−03 |
| SEQ ID: | SEQ ID: | | | | | | |
| 424 | 431, 432, 433 | | | | | | |
| TfR27 | BBBB504 | 6.96E−09 | 8.82E+04 | 6.14E−04 | 5.58E−08 | 8.51E+04 | 4.75E−03 |
| SEQ ID: | SEQ ID: | | | | | | |
| 343 | 441, 442, 443 | | | | | | |
| TfR28 | BBBB508 | 5.64E−09 | 1.09E+05 | 6.14E−04 | 5.57E−08 | 1.12E+05 | 6.24E−03 |
| SEQ ID: | SEQ ID: | | | | | | |
| 444 | 451, 452, 453 | | | | | | |
| TfR29 | BBBB509 | 6.45E−08 | 7.10E+03 | 4.58E−04 | 1.53E−05 | 3.41E+02 | 5.22E−03 |
| SEQ ID: | SEQ ID: | | | | | | |
| 454 | 63, 64, 65 | | | | | | |
| TfR30 | BBBB522 | 5.29E−08 | 5.27E+03 | 2.79E−04 | 1.66E−05 | 3.80E+02 | 6.30E−03 |
| SEQ ID: | SEQ ID: | | | | | | |
| 464 | 471, 472, 473 | | | | | | |
| TfR31 | BBBB529 | 2.11E−09 | 1.10E+05 | 2.31E−04 | 4.6E−08 | 1.09E+05 | 5.01E−03 |
| SEQ ID: | SEQ ID: | | | | | | |
| 474 | 481, 482, 483 | | | | | | |
| TfR32 | BBBB530 | 3.92E−09 | 1.21E+05 | 4.76E−04 | 2.92E−07 | 6.79E+04 | 1.98E−02 |
| SEQ ID: | SEQ ID: | | | | | | |
| 484 | 491, 492, 493 | | | | | | |
| TfR33 | BBBB532 | 5.1E−09 | 2.00E+05 | 1.02E−03 | 2.24E−08 | 2.14E+05 | 4.78E−03 |
| SEQ ID: | SEQ ID: | | | | | | |
| 494 | 501, 502, 503 | | | | | | |
| TfR34 | BBBB538 | 1.62E−08 | 2.07E+05 | 3.35E−03 | 2.96E−07 | 1.07E+05 | 3.17E−02 |
| SEQ ID: | SEQ ID: | | | | | | |
| 504 | 511, 512, 513 | | | | | | |
| TfR35 | BBBB539 | 2.76E−10 | 9.35E+04 | 2.59E−05 | 5.03E−08 | 8.92E+04 | 4.49E−03 |
| SEQ ID: | SEQ ID: | | | | | | |
| 514 | 521, 522, 523 | | | | | | |
| TfR36 | BBBB540 | 1.19E−08 | 7.15E+04 | 8.48E−04 | 1.2E−07 | 6.32E+04 | 7.56E−03 |
| SEQ ID: | SEQ ID: | | | | | | |
| 524 | 531, 532, 533 | | | | | | |
| TfR37 | BBBB546 | 1.68E−09 | 8.51E+04 | 1.43E−04 | 3.62E−08 | 9.40E+04 | 3.40E−03 |
| SEQ ID: | SEQ ID: | | | | | | |
| 534 | 541, 542, 543 | | | | | | |
| TfR38 | BBBB547 | 3.18E−09 | 1.90E+05 | 6.05E−04 | 5.98E−08 | 1.77E+05 | 1.06E−02 |
| SEQ ID: | SEQ ID: | | | | | | |
| 544 | 551, 552, 553 | | | | | | |

[0391] Antibodies were generated against the TfR by immunizing rodents and llamas. The resultant mAbs were screened for binding competition with transferrin and non-competitive mAbs formatted as scFv or nanobodies in a tripod mAb (also named TTP mAb) architecture and characterized. The tripod is used to deliver a substance of interest (e.g., a monoclonal antibody) to the brain. More specifically, a tripod construct (FIG. 1) containing a fusion of an antigen binding fragment of an antibody against TfR and a monoclonal antibody of interest (mAb) was developed to help the mAb penetrate the BBB and result in substantially higher brain concentrations of the mAb than the mAb alone.

[0392] For example, a tripod mAb consists of the therapeutic mAb with a TfR binding scFv or nanobody appended to the C-terminus of one antibody heavy chain using a short, flexible linker. Tripod mAbs were analysed for characteristics that have been previously described to enhance transcytosis (reviewed in Goulatis and Shusta 2017): valency, binding affinity, pH dependent binding, and rapid internalization in brain endothelial cells (FIGS. 2-4).

[0393] Heavy and light chain variable sequences of an antibody against TfR were fused in a single genetic construct as the single-chain variable fragment (scFv) using the following format, Hc_GTEGKSSGSGSESKST (SEQ ID NO: 314)_Lc. The scFv or a VHH against TfR was then fused to the C-terminus of the heavy chain (Hc) of an antibody of interest using either GGSGGS (SEQ ID NO: 312) or GGAGGA (SEQ ID NO: 313) linker. The Zymeworks heterodimerization mutations in CH3 were utilized in the antibody He (Hc A: T350V_L351Y_F405A_Y407V; Hc B: T350V_T366L_K392L_T394W) to generate the tripod construct (FIG. 1), which is also referred to as a tripod mAb. A tripod mAb contains two light chains with the identical amino acid sequence and two heavy chains with different amino acid sequences. Only one of the two heavy chains is fused to a scFv or VHH of a TfR antibody of the invention and the two heavy chains also differ in their constant regions to facilitate heterodimerization between the two heavy chains. Thus, each tripod mAb according to an embodiment of the application is associated with three amino acid sequences: the amino acid sequence of the first heavy chain fused to the antigen binding fragment of a TfR antibody, the amino acid sequence of the light chain, and the amino acid sequence of the second heavy chain not fused to the antigen binding fragment of a TfR antibody.

### Tripod Expression and Purification

[0394] Tripod mAbs were expressed in CHO-Expi cells and purified using Protein A affinity chromatography followed by Size Exclusion chromatography or Ion-exchange chromatography.

[0395] Examples of the Tripod mAbs made are provided in Table 2a:

TABLE 2a

| | mAb | scFv | VHH | | | |
|---|---|---|---|---|---|---|
| Tripod | component | component | component | VL SEQ | VH SEQ | VHH/scFv |
| name | name (target) | name | name | ID NO | ID NO | SEQ ID NO |
| BBBB434 | B21M (IgG1 | | TfR1 | 11 | 12/10 | 6 |
| | AAS) | | | | | |
| BBBB978 | BACE | | TfR1 | 14 | 13/15 | 6 |
| | (IgG1AAS) | | | | | |
| BBBB1009 | Tau (IgG1) | | TfR1 | 17 | 16/18 | 6 |
| BBBB1011 | Tan (IgG1 | | Tfr1 | 20 | 19/21 | 6 |
| | AASYTE) | | | | | |
| BBBB1073 | B-amyloid | | Tfr1 | 23 | 22/24 | 6 |
| BBBB1215 | B21M (IgG4 | | TfR1 | 26 | 25/27 | 6 |
| | PAA) | | | | | |
| BBBB501 | B21M (IgG1 | TfR2 | | 36 | 35/37 | 28 |
| | AAS) | | | | | |
| BBBB951 | B21M (IgG1) | TfR2 | | 39 | 38/40 | 28 |
| BBBB979 | BACE | TfR2 | | 42 | 41/43 | 28 |
| | (IgG1AAS) | | | | | |
| BBBB1520 | Tau (IgG1 | TfR2 | | 45 | 44/46 | 28 |
| | AASYTE) | | | | | |
| BBBB1018 | Tau (IgG1) | TfR2 | | 48 | 47/49 | 28 |
| BBBB1076 | B-amyloid | TfR2 | | 51 | 50/52 | 28 |
| BBBB1216 | B21M (IgG4 | TfR2 | | 54 | 53/55 | 28 |
| | PAA) | | | | | |
| BBBB509 | B21M (IgG1 | TfR3 | | 64 | 65/65 | 56 |
| | AAS) | | | | | |
| BBBB946 | B21M (IgG1) | TfR3 | | 67 | 66/68 | 56 |
| BBBB947 | BACE | TfR3 | | 70 | 69/71 | 56 |
| | (IgG1AAS) | | | | | |
| BBBB1023 | Tau (IgG1 | TfR3 | | 73 | 72/74 | 56 |
| | AASYTE) | | | | | |
| BBBB1021 | Tau (IgG1) | TfR3 | | 76 | 75/77 | 56 |
| BBBB1079 | B-amyloid | TfR3 | | 79 | 78/80 | 56 |
| BBBB1217 | B21M (IgG4 | TfR3 | | 82 | 81/83 | 56 |
| | PAA) | | | | | |
| BBBB520 | B21M (IgG1 | TfR4 | | 92 | 91/93 | 84 |
| | AAS) | | | | | |
| BBBB975 | BACE | TfR4 | | 95 | 94/96 | 84 |
| | (IgG1AAS) | | | | | |
| BBBB1026 | Tau (IgG1 | TfR4 | | 98 | 97/99 | 84 |
| | AASYTE) | | | | | |
| BBBB1024 | Tau (IgG1) | TfR4 | | 101 | 100/102 | 84 |
| BBBB1082 | B-amyloid | TfR4 | | 104 | 103/105 | 84 |
| BBBB1218 | B21M (IgG4 | TfR4 | | 107 | 106/108 | 84 |
| | PAA) | | | | | |
| BBBB534 | B21M (IgG1 | TfR5 | | 117 | 116/118 | 109 |
| | AAS) | | | | | |
| BBBB945 | B21M (IgG1) | TfR5 | | 120 | 119/121 | 109 |
| BBBB973 | BACE | TfR5 | | 123 | 122/124 | 109 |
| | (IgG1AAS) | | | | | |
| BBBB1035 | Tau (IgG1 | TfR5 | | 126 | 125/127 | 109 |
| | AASYTE) | | | | | |
| BBBB1033 | Tau (IgG1) | TfR5 | | 129 | 128/130 | 109 |
| BBBB1219 | B21M (IgG4 | TfR5 | | 132 | 131/133 | 109 |
| | PAA) | | | | | |
| BBBB537 | B21M (IgG1 | TfR6 | | 142 | 141/143 | 134 |
| | AAS) | | | | | |
| BBBB989 | B21M (IgG1) | TfR6 | | 145 | 144/156 | 134 |
| BBBB977 | BACE | TfR6 | | 148 | 147/149 | 134 |
| | (IgG1AAS) | | | | | |
| BBBB1038 | Tau (IgG1 | TfR6 | | 151 | 150/152 | 134 |
| | AASYTE) | | | | | |
| BBBB1036 | Tau (IgG1) | TfR6 | | 154 | 153/155 | 134 |
| BBBB1085 | B-amyloid | TfR6 | | 157 | 156/158 | 134 |
| BBBB1220 | B21M (IgG4 | TfR6 | | 160 | 159/161 | 134 |
| | PAA) | | | | | |
| BBBB543 | B21M (IgG1 | TfR7 | | 170 | 169/171 | 162 |
| | AAS) | | | | | |
| BBBB1112 | B21M (IgG1) | TfR7 | | 173 | 172/174 | 162 |
| BBBB969 | BACE | TfR7 | | 176 | 175/177 | 162 |
| | (IgG1AAS) | | | | | |
| BBBB1048 | Tau (IgG1 | TfR7 | | 179 | 178/180 | 162 |
| | AASYTE) | | | | | |
| BBBB1046 | Tau (IgG1) | TfR7 | | 182 | 181/183 | 162 |
| BBBB1088 | B-amyloid | TfR7 | | 185 | 184/186 | 162 |
| BBBB1221 | B21M (IgG4 | TfR7 | | 188 | 187/189 | 162 |
| | PAA) | | | | | |
| BBBB556 | B2 IM (IgG1 | TfR8 | | 198 | 197/199 | 190 |
| | AAS) | | | | | |
| BBBB993 | B21M (IgG1) | TfR8 | | 201 | 200/202 | 190 |
| BBBB983 | BACE | TfR8 | | 204 | 203/205 | 190 |
| | (IgG1AAS) | | | | | |
| BBBB1051 | Tau (IgG1 | TfR8 | | 207 | 206/208 | 190 |
| | AASYTE) | | | | | |
| BBBB1049 | Tau (IgG1) | TfR8 | | 210 | 209/211 | 190 |
| BBBB1091 | B-amyloid | TfR8 | | 213 | 212/214 | 190 |
| BBBB1222 | B21M (IgG4 | TfR8 | | 216 | 215/217 | 190 |
| | PAA) | | | | | |
| BBBB557 | B21M (IgG1 | TfR9 | | 226 | 225/227 | 218 |
| | AAS) | | | | | |
| BBBB970 | BACE | TfR9 | | 229 | 228/230 | 218 |
| | (IgG1AAS) | | | | | |
| BBBB1055 | Tau (IgG1 | TfR9 | | | 231/233 | 218 |
| | AASYTE) | | | | | |
| BBBB1053 | Tau (IgG1) | TfR9 | | 235 | 234/236 | 218 |
| BBBB1094 | B-amyloid | TfR9 | | 238 | 237/239 | 218 |
| BBBB1223 | B21M (IgG4 | TfR9 | | 241 | 240/242 | 218 |
| | PAA) | | | | | |
| BBBB354 | B21M (IgG1 | TfR10 | | 251 | 250/252 | 243 |
| | AAS) | | | | | |
| BBBB932 | B21M (IgG1) | TfR10 | | 254 | 253/255 | 243 |
| BBBB383 | BACE | TfR10 | | 257 | 256/258 | 243 |
| | (IgG1AAS) | | | | | |
| BBBB1224 | B21M (IgG4 | TfR10 | | 260 | 259/261 | 243 |
| | PAA) | | | | | |
| BBBB368 | B21M (IgG1 | TfR11 | | 270 | 269/271 | 262 |
| | AAS) | | | | | |
| BBBB934 | B21M (IgG1) | TfR11 | | 273 | 273/274 | 262 |
| BBBB426 | BACE | TfR11 | | 276 | 275/277 | 262 |
| | (IgG1AAS) | | | | | |
| BBBB1136 | Tau (IgG1 | TfR12 | | 286 | 285/287 | 278 |
| | AASYTE) | | | | | |
| BBBB1134 | Tau (IgG1) | TfR12 | | 289 | 288/290 | 278 |
| BBBB1133 | Tau (IgG1 | TfR13 | | 299 | 298/300 | 291 |
| | AASYTE) | | | | | |
| BBBB1131 | Tau (IgG1) | TfR13 | | 302 | 301/303 | 291 |
| BBBB1166 | B-amyloid | TfR13 | | 305 | 304/306 | 291 |
| BBBB432 | B21M (IgG1 | TfR14 | | 321 | 320/322 | 316 |
| | AAS | | | | | |
| BBBB435 | B21M (IgG1 | TfR15 | | 328 | 327/329 | 323 |
| | AAS | | | | | |
| BBBB436 | B21M (IgG1 | TfR16 | | 335 | 334/336 | 330 |
| | AAS | | | | | |
| BBBB439 | B21M (IgG1 | TfR17 | | 342 | 341/343 | 337 |
| | AAS | | | | | |
| BBBB459 | B21M (IgG1 | TfR18 | | 352 | 351/353 | 344 |
| | AAS | | | | | |
| BBBB464 | B21M (IgG1 | TfR19 | | 362 | 361/363 | 354 |
| | AAS | | | | | |
| BBBB467 | B21M (IgG1 | TfR20 | | 372 | 371/373 | 364 |
| | AAS | | | | | |
| BBBB476 | B21M (IgG1 | TfR21 | | 382 | 381/383 | 374 |
| | AAS | | | | | |
| BBBB478 | B21M (IgG1 | TfR22 | | 392 | 391/393 | 384 |
| | AAS | | | | | |
| BBBB479 | B21M (IgG1 | TfR23 | | 402 | 401/403 | 394 |
| | AAS | | | | | |
| BBBB482 | B21M (IgG1 | TfR24 | | 412 | 411/413 | 404 |
| | AAS | | | | | |
| BBBB486 | B21M (IgG1 | TfR25 | | 422 | 421/423 | 414 |
| | AAS | | | | | |
| BBBB500 | B21M (IgG1 | TfR26 | | 432 | 431/433 | 424 |
| | AAS | | | | | |
| BBBB504 | B21M (IgG1 | TfR27 | | 442 | 441/443 | 434 |
| | AAS | | | | | |
| BBBB508 | B21M (IgG1 | TfR28 | | 452 | 451/453 | |
| | AAS | | | | | |
| BBBB509 | B21M (IgG1 | TfR29 | | 462 | 461/463 | 454 |
| | AAS | | | | | |
| BBBB522 | B21M (IgG1 | TfR30 | | 472 | 471/473 | 464 |
| | AAS | | | | | |
| BBBB529 | B21M (IgG1 | TfR31 | | 482 | 481/483 | 474 |
| | AAS | | | | | |
| BBBB530 | B21M (IgG1 | TfR32 | | 492 | 491/493 | 484 |
| | AAS | | | | | |
| BBBB532 | B21M (IgG1 | TfR33 | | 502 | 501/503 | 494 |
| | AAS | | | | | |
| BBBB538 | B21M (IgG1 | TfR34 | | 512 | 511/513 | 504 |
| | AAS | | | | | |
| BBBB539 | B21M (IgG1 | TfR35 | | 522 | 521/523 | 514 |
| | AAS | | | | | |
| BBBB540 | B21M (IgG1 | TfR36 | | 532 | 531/533 | 524 |
| | AAS | | | | | |
| BBBB546 | B21M (IgG1 | TfR37 | | 542 | 541/543 | 534 |
| | AAS | | | | | |
| BBBB547 | B21M (IgG1 | TfR38 | | 552 | 551/553 | 544 |
| | AAS | | | | | |

### Cell Binding and TfR Specificity

[0396] Tripod mAbs were analysed for characteristics that have been previously described to enhance transcytosis (reviewed in Goulatis and Shusta 2017): valency, binding affinity, pH dependent binding, and rapid internalization in brain endothelial cells (FIGS. 2-4).

[0397] Human brain endothelial cells (hCMECD3, 50,00 cells) were incubated with 10 ug/mL purified tripod mAb and allowed to incubate overnight at 4° C. in either the presence or absence of 10×molar concentration of huTfR1 ECD (SEQ ID NO; 1). Cells were fixed and washed the following morning, incubated with secondary antibody (Jackson Immunosciences Cat #109-546-170), washed again and then analyzed by FACS. Positive binders were defined as having binding signal greater than 2-fold over isotype control and a ratio of binding signal/binding signal with TfR3ECD≳2 (Table 2b).

TABLE 2b
hCMECD3 cell binding and specificity for tripod mAbs.

| | | Antibody Binding | | | Antibody Binding | | | |
|---|---|---|---|---|---|---|---|---|
| | | without TfR | | | with TfR | | | |
| Protein Batch ID | SEQ ID NOs: | Rep 1 | Rep 2 | Ave Signal | Rep 1 | Rep 2 | Ave Signal | Ratio |
| BBBB434 | 10, 11, 12 | 1749 | 1405 | 1577 | 808 | 834 | 821 | 1.9 |
| BBBB501 | 35, 36, 37 | 2281 | 1848 | 2065 | 507 | 790 | 649 | 3.18 |
| BBBB509 | 63, 64, 65 | 1921 | 1814 | 1868 | 632 | 626 | 629 | 2.97 |
| BBBB520 | 91, 92, 93 | 3413 | 3588 | 3501 | 766 | 874 | 820 | 4.27 |
| BBBB534 | 116, 117, 118 | 3378 | 3246 | 3312 | 782 | 849 | 816 | 4.06 |
| BBBB537 | 141, 142, 143 | 3667 | 3531 | 3599 | 841 | 803 | 822 | 4.38 |
| BBBB543 | 169, 170, 171 | 1490 | 1291 | 1391 | 776 | 738 | 757 | 1.84 |
| BBBB556 | 197, 198, 199 | 3262 | 3539 | 3401 | 711 | 749 | 730 | 4.66 |
| BBBB557 | 225, 226, 227 | 2394 | 2204 | 2299 | 327 | 361 | 344 | 6.68 |

[0398] Additional hCMECD3 cell binding assay was conducted to measure specificity for additional tripod mAbs, and the results of which are shown in Table 2c below:

TABLE 2c
IgG4 versions:

| Name | Binding Target | Description | ELN | ka (1/Ms) | kd (1/s) | KD (M) |
|---|---|---|---|---|---|---|
| BBBB1215 (n = 6) | TfR | B21M IgG4 ZW BBBB434 | BBB-00735 | (4.56 ± 0.26)E+05 | (2.83 ± 0.25)E−03 | (6.24 ± 0.75)E−09 |
| BBBB1217 (n = 3) | TfR | B21M IgG4 ZW BBBB509 | BBB-00735 | No Binding | | |
| BBBB1224 (n = 6) | TfR | B21M IgG4 ZW BBBB354 | BBB-00735 | (9.90 ± 0.96)E+05 | (1.10 ± 0.21)E−02 | (1.11 ± 0.23)E−08 |
| BBBB1227 (n = 3) | CD98hc | B21M IgG4 ZW BBBB445 | BBB-00718 | (4.40 ± 0.17)E+05 | (2.42 ± 0.64)E−03 | (5.49 ± 1.23)E−09 |
| BBBB1228 (n = 3) | CD98hc | B21M IgG4 ZW BBBB448 | BBB-00718 | (4.26 ± 1.13)E+05 | (1.77 ± 0.71)E−03 | (4.21 ± 2.34)E−09 |
| BBBB1229 (n = 3) | CD98hc | B21M IgG4 ZW BBBB449 | BBB-00718 | (4.82 ± 1.34)E+05 | (3.36 ± 2.38)E−03 | (6.88 ± 3.14)E−09 |

Results are Average ± 95% CI

### Transferrin Competition

[0399] MDCK cells expressing recombinant human transferrin receptor were plated at 10,000 cells per well in a MA6000 384 HB plate and cultured for 18 hours in DMEM media supplemented with 10% FBS and 500 μg/mL Geneticin. Prior to the assay the cells were incubated in serum-free DMEM media supplemented with 5 μM Monensin for 1h in a 37° C. C02 incubator and then for 30 minutes at room temperature with StartingBlock (PBS) supplemented with 5 μM Monensin. The cells in alternate rows of the plate were incubated for 30 minutes at room temperature with 2.7 mg/mL human holo transferrin prepared in serum-free DMEM media supplemented with 5 μM Monensin. Test antibodies were diluted to 5 μg/mL in serum-free DMEM media supplemented with 5 μM Monensin and added to duplicate wells containing the holo transferrin or to duplicate wells that received no transferrin and then incubated for 1h at room temperature. The supernatants were removed and 2 μg/mL Sulfo-TAG labeled anti-human antibody was added to each well and incubated for 30 minutes at room temperature. All wells were washed with PBS and Surfactant-Free MSD Read Buffer T was added. The plates were read on an MSD SECTOR® S600 imager.

[0400] Statistical analysis including mean, standard deviation and RSD were performed in Excel. Any samples with an RSD>25% were excluded. The mean values of the test antibodies incubated in the presence of transferrin were compared against the mean values in the absence of transferrin. Antibodies with values in the presence of transferrin that were ≤70% of the values in the absence of transferrin were considered ligand competitive (Table 3).

TABLE 3
Selected tripod mAbs are not competitive with transferrin.

| | | w/o Tf | with Tf | Relative % |
|---|---|---|---|---|
| Sample ID | SEQ ID NO: | avg value | avg value | Ab binding |
| BBBB434 | 10, 11, 12 | 1758 | 1762 | 100.3 |
| BBBB501 | 35, 36, 37 | 1348 | 1618 | 120.0 |
| BBBB509 | 63, 64, 65 | 282 | 447 | 158.6 |
| BBBB520 | 91, 92, 93 | 1369 | 1798 | 131.3 |
| BBBB534 | 116, 117, 118 | 1350 | 1141 | 84.5 |
| BBBB537 | 141, 142, 143 | 1504 | 1851 | 123.1 |
| BBBB543 | 169, 170, 171 | 225 | 233 | 103.8 |
| BBBB556 | 197, 198, 199 | 1246 | 1531 | 122.9 |
| BBBB557 | 225, 226, 227 | 598 | 530 | 88.7 |

[0401] Internalization

[0402] Human brain endothelial cells (hCMEC/D3) were plated at 10,000 cells/well in Collagen-coated 384-well Cell Carrier Ultra plates (Perkin Elmer) and allowed to attach for 16 hours at 37° C. in a humidified incubator. The cells (50,00 cells) were then incubated with 200 ug/mL purified tripod mAb and allowed to incubate at 37° C. for one hour. The cells were fixed, washed and incubated with a fluorescently labeled secondary antibody for one hour. The cells were then washed again and incubated with fluorescently labeled actin stain, Phalloidin, and nuclear stain, Hoeschst 33342. Cells were washed again and imaged using the ImageXpress Micro (Molecular Devices) with a 40×objective. Internalizing mAbs were identified on the basis of colocalization with Phalloidin using MetaXpress 6.0. All mAbs from Tables 2 and 3 were positive for internalization.

Affinity Analysis & pH-Dependent Binding, Species Cross-Reactivity

[0403] Affinity and pH dependency were initially measured using a Forte Bio Octet Platform. Biotinylated huTfR was immobilized on streptavidin sensors and mAbs associated for 180 seconds in 0.1M Phosphate pH 7.4. Dissociation was completed for 300 seconds in either 0.1M Phosphate pH 7.4 or 0.1M Phosphate pH 5 (Table 4). Preferably, a tripod mAb of interest has a high binding affinity at pH7.4 and low binding affinity at pH5, e.g., KD≥1 nM and kd≥10⁻⁴ sec⁻¹, preferably about 10⁻³ at pH 5, such that the tripod mAb binds to TfR at a neutral pH (e.g., pH7.4) and dissociates from TfR at an acidic pH (e.g., pH5). Preferably, the KD at the acidic pH and the neutral pH and are similar, such as at a ratio of KD acidic/KD neutral of about 1.5.

TABLE 4
Kinetic rate constants measured using the Octet platform to huTfR.

| | pH 7.4 Dissociation | | | pH 5 Dissociation | | | Ratio |
|---|---|---|---|---|---|---|---|
| Sample ID | KD (M) | kₒₙ (1/Ms) | k_{dis} (1/s) | KD (M) | kₒₙ (1/Ms) | k_{dis} (1/s) | pH 5/pH 7.4 |
| BBBB434 | 1.73E−08 | 1.53E+05 | 2.64E−03 | 2.45E−08 | 1.66E+05 | 4.06E−03 | 1.54 |
| BBBB501 | 1.60E−08 | 1.47E+05 | 2.35E−03 | 1.68E−08 | 1.53E+05 | 2.57E−03 | 1.09 |
| BBBB509 | 6.45E−08 | 7.10E+03 | 4.58E−04 | 1.53E−05 | 3.41E+02 | 5.22E−03 | 11.39 |
| BBBB520 | 3.28E−09 | 1.53E+05 | 5.00E−04 | 7.32E−08 | 1.39E+05 | 1.02E−02 | 20.41 |
| BBBB534 | 1.15E−08 | 7.52E+04 | 8.63E−04 | 7.14E−08 | 7.67E+04 | 5.48E−03 | 6.35 |
| BBBB537 | 3.77E−10 | 1.38E+05 | 5.22E−05 | 4.42E−08 | 1.37E+05 | 6.05E−03 | 115.81 |
| BBBB543 | 8.29E−08 | 2.63E+05 | 2.18E−02 | 1.62E−05 | 9.86E+03 | 1.60E−01 | 7.33 |
| BBBB556 | <1.0E−12 | 8.57E+04 | <1.0E−07 | 1.99E−08 | 1.07E+05 | 2.13E−03 | Faster |
| BBBB557 | 2.94E−08 | 2.28E+05 | 6.69E−03 | 2.13E−06 | 2.97E+04 | 6.33E−02 | 9.46 |

[0404] To gain additional accuracy for affinity measurements, tripod mAb affinity for huTfR was determined using surface plasmon resonance (SPR) on a BioRad Proteon instrument, ProteOn XPR36 system. An Fc capture surface was generated by coupling anti-IgG Fc mAb (Jackson ImmunoResearch) to a GLC chip (BioRad) using the amine-coupling chemistry (BioRad). Tripod mAbs were captured using a concentration of 0.3 ug/mL, flowed for 30 seconds at 60 uL/min for a target density of 120 RU huTfR was then flowed over the immobilized tripod mAbs at concentrations from 3.125-800 nM (in a 4-fold serial dilution) for 3 min (at 50 μL/min) association followed by dissociation for 10 minutes at 50 uL/min. The chip surface was regenerated with two 18 second pulses of 100 mM H3PO4 (Sigma) at 100 μL/min. The collected data were processed using ProteOn Manager software V3.1.0.6 (BioRad). First, the data was corrected for background using inter-spots. Then, double reference subtraction of the data was performed by using the buffer injection for analyte injections. The kinetic analysis of the data was performed using a Langmuir 1:1 binding model. The result for each mAb was reported in the format of Ka (On-rate), Kd (Off-rate) and KD (equilibrium dissociation constant) (Table 5).

TABLE 5
Binding affinity of anti-TfR brain shuttles for TfR when fused to B21M mAb or BACE mAb.

| | B21M mAb | | |
|---|---|---|---|
| mAb | ka | kd | KD |
| (B21M/BACE) | (1/Ms) | (1/s) | (M) |
| BBBB434/ | 5.39E+05 | 2.34E−03 | 4.34E−09 |
| BBBB978 | | | |
| BBBB501/ | 2.45E+05 | 2.45E−03 | 1.00E−08 |
| BBBB979 | | | |
| BBBB520/ | 6.31E+05 | 6.28E−04 | 9.95E−10 |
| BBBB975 | | | |
| BBBB534/ | 1.03E+05 | 5.50E−04 | 5.35E−09 |
| BBBB973 | | | |
| BBBB537/ | 7.34E+05 | 2.55E−04 | 3.48E−10 |
| BBBB977 | | | |
| BBBB543/ | 3.27E+05 | 1.90E−02 | 5.80E−08 |
| BBBB969 | | | |
| BBBB556/ | 1.94E+05 | 1.70E−04 | 8.78E−10 |
| BBBB983 | | | |
| BBBB557/ | 4.22E+05 | 6.43E−03 | 1.52E−08 |
| BBBB970 | | | |
| BBBB354/ | (14.4 ± 0.59)E+05 | (2.2 ± 0.19)E−02 | (1.54 ± 0.2)E−08 |
| BBBB383 | | | |
| BBBB368/ | (5.98 ± 0.27)E+05 | (6.06 ± 1.49)E−02 | (1.1 ± 10.21)E−07 |
| BBBB426 | | | |

| | BACE mAb | | |
|---|---|---|---|
| mAb | ka | kd | KD |
| (B21M/BACE) | (1/Ms) | (1/s) | (M) |
| BBBB434/ | (4.23 ± 0.14)E+05 | (2.67 ± 0.06)E−03 | (6.31 ± 0.10)E−09 |
| BBBB978 | | | |
| BBBB501/ | (2.60 ± 0.15)E+05 | (2.67 ± 0.05)E−03 | (1.03 ± 0.06)E−08 |
| BBBB979 | | | |
| BBBB520/ | (5.91 ± 0.44)E+05 | (6.59 ± 0.11)E−04 | (1.12 ± 0.09)E−09 |
| BBBB975 | | | |
| BBBB534/ | (1.08 ± 0.06)E+05 | (4.34 ± 0.35)E−04 | (4.03 ± 0.46)E−09 |
| BBBB973 | | | |
| BBBB537/ | (6.75 ± 0.50)E+05 | (1.52 ± 0.08)E−04 | (2.27 ± 0.28)E−10 |
| BBBB977 | | | |
| BBBB543/ | (2.73 ± 0.03)E+05 | (2.23 ± 0.21)E−02 | (8.16 ± 0.92)E−08 |
| BBBB969 | | | |
| BBBB556/ | (1.99 ± 0.10)E+05 | <8.67E−05 | <4.36E−10 |
| BBBB983 | | | |
| BBBB557/ | (3.45 ± 0.09)E+05 | (7.21 ± 0.30)E−03 | (2.09 ± 0.05)E−08 |
| BBBB970 | | | |
| BBBB354/ | (11.1 ± 0.29)E+05 | (2.00 ± 0.18)E−02 | (1.79 ± 0.2)E−08 |
| BBBB383 | | | |
| BBBB368/ | (8.55 ± 0.15)E+05 | (11.1 ± 0.65)E−02 | (1.3 ± 0.68)E−07 |
| BBBB426 | | | |

[0405] pH dependent binding was assessed using the SPR (proteon) method described above, except during the dissociation the buffer pH was stepped down from 7.4 to 6.5 to 6.0. The individual sensorgrams were evaluated and scored for pH dependent binding if the off-rate was faster as the pH decreased (example in FIG. 3).

[0406] Species cross-reactivity was assessed using the same method as for determining binding affinity, except the TfRs used were cyno (SEQ ID NO: 2), marmoset (SEQ ID NO: 3), rat (SEQ ID NO: 4) and mouse (SEQ ID NO: 5). No rat or mouse cross-reactive mAbs were identified. Cyno and marmoset cross-reactive tripod mAbs were identified (Table 6).

TABLE 6
Species cross-reactivity for selected tripod mAbs

| | Cynomolgus | | | Marmoset | | |
|---|---|---|---|---|---|---|
| mAB | ka (1/Ms) | kd (1/s) | KD (M) | ka (1/Ms) | kd (1/s) | KD (M) |
| BBBB520 | 5.29E+05 | 2.52E−04 | 4.77E−10 | 3.73E+05 | 3.66E−04 | 9.81E−10 |
| BBBB534 | 2.44E+05 | 7.78E−03 | 3.19E−08 | 2.10E+05 | 4.99E−04 | 2.38E−09 |
| BBBB537 | 6.18E+05 | 8.83E−05 | 1.43E−10 | 2.66E+05 | 6.56E−05 | 2.46E−10 |
| BBBB543 | 2.50E+05 | 2.91E−02 | 1.17E−07 | 2.04E+05 | 7.73E−03 | 3.80E−08 |
| BBBB556 | 8.68E+04 | 2.05E−03 | 2.36E−08 | 4.73E+04 | 1.04E−03 | 2.20E−08 |
| BBBB557 | 2.95E+05 | 1.86E−02 | 6.31E−08 | 1.91E+05 | 1.53E−02 | 8.03E−08 |

[0407] An anti-TfR antibody or antigen-binding fragment of the invention can be used to deliver any type of immunoglobulin. Similar results have been observed with IgG1 and IgG4 therapeutic mAbs delivered by the tripod structure (data not shown).

### Mouse Pharmacokinetics and Pharmacodynamics and Anti-BACE mAb Brain Shuttles

[0408] To analyze the impact of binding properties on transcytosis an in vivo PK/PD study was completed in mice. C57BL/6-Tfrctm2618(TFRC)Arte mice (Taconic Artemis) were administered with test articles by IV bolus injection (13 mg/kg, 10 mL/kg). At the scheduled timepoints mice were anesthetized by inhalation isoflurane. Blood collected via cardiac puncture, and plasma processed. Mouse brain was collected following whole-body perfusion with 5 mLs of 0.9% saline solution. The collected brain sample (minus cerebellum) was split into right/left hemispheres, snap frozen in liquid nitrogen, and stored at −70° C. until tissue homogenization and capillary depletion processing.

[0409] None of the TfR binding molecules were cross-reactive with murine TfR so human TfR KI mice were used to assess transcytosis. The tripod mAb was formatted with an anti-beta secretase 1 (BACE1) antagonist mAb to allow for pharmacodynamic assessment of the mAb following transcytosis into the brain. BACE1 cleaves beta-amyloid to release Aβ₁₋₄₀. The inhibition of BACE1 is measured by quantitating the concentration of the product Aβ₁₋₄₀ in the brain. Mice were dosed intravenously with two tripod mAbs, BBBB383 and BBBB426, along with the control mAb, BBBB456. BBBB456 is the anti-BACE1 antagonist mAb alone. BBBB383 and BBBB426 differ only in their affinity for TfR, K_{D}=18 nM and 130 nM respectively. Brain exposure was determined following perfusion and capillary depletion to reduce interference from mAb in blood or retained within the vascular endothelium (Johnsen, Burkhart et al. 2017). The brain concentration of both BBBB383 and BBBB426 was enhanced over BBBB456 at all timepoints, with BBBB383 having greater mAb brain concentration than BBBB426. A strong PK/PD relationship was observed with mAb brain concentration correlative with a reduction in Aβ₁₋₄₀ levels. The lower plasma exposure of both TfR containing mAbs is attributed to TMDD through binding to TfR in the periphery.

[0410] Selected anti-TfR brain shuttles were then fused to a prototypical anti-BACE (β-secretase) mAb and binding affinity was reassessed using same method as described above. As shown in Table 5, the affinity of the anti-TfR brain shuttles was similar when fused to B21M mAb (anti-human respiratory syncytial virus) and anti-BACE antagonist mAb. Internalization was assessed for selected molecules and found unchanged from internalization observed when the anti-TfR brain shuttle was fused to B21M mAb.

[0411] Since none of the anti-TfR brain shuttles bound to mouse or rat TfR, in vivo rodent studies were conducted in huTfR knock-in mice (C57BL/6-Tfrctm2618(TFRC)Arte mice (Taconic Artemis)) using the prototypical anti-BACE antagonist mAb (BBBB456, SEQ ID NOs: 307, 308 and 309). The anti-BACE antagonist mAb was selected as a model PD system for measuring inhibition of BACE1 (through the concentration of its product peptide, Aβ1-40), a reflection of the amount of mAb that was trafficked to the brain.

[0412] The first in vivo study assessed the PK/PD relationship in the brains of huTfR mice. The knock-in (KI) mice were dosed at 13 mg/kg iv. with BBBB383 (SEQ ID NOs: 256, 257 and 258), BBBB426 (SEQ ID NOs: 275, 276 and 277) and BBBB456 (SEQ ID NO: 307, 308 and 309). Brains and plasma were harvested at 4, 24 and 72 hours. At the scheduled timepoints, mice were anesthetized by inhalation of isoflurane. Mouse brains from KI mice were collected following whole-body perfusion with 5 mL of 0.9% saline solution. The collected brain sample (minus cerebellum) was split into right/left hemispheres, snap frozen in liquid nitrogen, and stored at −70° C. until tissue homogenization and capillary depletion processing.

[0413] For sample preparation of the capillary-depleted brain tissue lysates, individual weights were obtained for the brain hemispheres to measure drug concentration. The brain tissue samples were added to a calculated volume of modified dPBS buffer (2.5-3 μL buffer per 1 mg tissue) containing protease inhibitor (Pierce; A32955) and transferred to Lysing Matrix D (MP Biomedicals™; 6913-100) tubes. Tissue samples were homogenized at 2.9 m/s for 15 seconds using a Bead Ruptor 24 Elite (Omni International). The total cell suspension was transferred into a new tube and mixed with an equal volume of a 26% dextran buffer (13% final dextran concentration). Mixed tissue homogenate was centrifuged at 2,000 g for 10 minutes at 4° C. Carefully, the upper layer (capillary-depleted fraction) was separated from the remaining sample and transferred to a new tube containing 10×RIPA lysis buffer (Millipore™; 20-188). Capillary-depleted samples plus lysis buffer were vortexed well, centrifuged at 14,000 rpm for 30 minutes at 4° C., and supernatant transferred to a new tube. Brain tissue sample lysates were either stored frozen at −70° C. or measured for protein concentrations using BCA protein assay kit (Pierce™; 23227). Final brain tissue sample lysates were normalized to 7 mg/mL total protein concentration prior to immunoassay determination of BBB-enabled mAbs.

[0414] The concentration of BBB-enabled mAbs in mouse brain tissue for PK assessment was determined using MesoScale Discovery (MSD®; Gaithersburg, Md.) ECLIA technology developed in a typical sandwich immunoassay format. The assay was performed on MSD Gold™ Small Spot Streptavidin 96-well plates (Cat: L45SA). Briefly, streptavidin-coated plates were blocked with 1% bovine serum albumin (BSA) in 1×phosphate buffered saline (PBS) for 30 minutes at room temperature. The standard curve was prepared fresh in 50% naïve C57BL/6 mouse brain tissue lysates by serial dilution. Frozen quality controls (QCs) prepared in naïve C57BL/6 mouse brain tissue lysates at 2× of the working assay concentration were diluted and tested with each assay. Master mix containing the capture (biotinylated anti-human Fc mAb, 1 μg/mL) and detection (ruthenium-labeled anti-human Fc mAb, 0.5 μg/mL) reagents was combined with diluted standards, QCs, and samples at a 1:1 volume ratio in the assay plate. The mixture was incubated for 1 hour with shaking at room temperature. Assay plates were washed, and MSD T read buffer (1×) was added to all wells. Raw data values were read on an MSD SECTOR® S600 imager. The standard curve range for the assay was tested at 1-512 ng/mL with a minimum required sample dilution (MRD) of 1:2, yielding a limit of sensitivity of 2 ng/mL in brain tissue lysates. The MSD output files with the raw ECL counts were imported into Watson LIMS (Thermo Scientific) and then regressed with a 5-parameter logistic fit with 1/F2 weighting.

[0415] The concentration of BBB-enabled mAbs in mouse plasma for PK assessment was determined using a similar protocol as described above. The standard curve was prepared fresh in 10% pooled mouse plasma by serial dilution. Frozen QCs prepared in pooled mouse plasma at 10× of the working assay concentration were diluted and tested with each assay. Master mix containing the capture (biotinylated anti-human Fc mAb, 1 μg/mL) and detection (ruthenium-labeled anti-human Fc mAb, 0.5 μg/mL) reagents was combined with diluted standards, QCs, and samples at a 1:1 volume ratio in the assay plate. The mixture was incubated with shaking for 1 hour at room temperature. Assay plates were washed, and MSD T read buffer (1×) was added to all wells. Raw data values were read on an MSD SECTOR® S600 imager. The standard curve range for the assay was tested at 2-512 ng/mL with an MRD of 1:10, yielding a limit of sensitivity of 20 ng/mL in plasma matrix. The MSD output files with the raw ECL counts were imported into Watson LIMS (Thermo Scientific) and the regressed with a 5-parameter logistic fit with 1/F2 weighting.

[0416] BACE activity measurements were made by homogenizing mouse brains in 2 ml lysing matrix D tube (8 μl of 0.4% DEA/50 mM NaCl per mg of brain weight, Fast Prep-24 at 6/shakes/sec for 20 sec). Tubes were then centrifuged at 4° C. for 5 min in an Eppendorf Centrifuge set to a maximum speed. Homogenate (supernatant) was then transferred to precooled tubes which were then centrifuged for 70 minutes at 13,000 rpm at 4° C. Supernatant was then transferred to a tube containing 10% of 0.5 M Tris/HCL and frozen at −80° C. until assayed. Aβ 1-40 peptide standards and thawed processed brain homogenate are pre-complexed at 1:1 with ruthenium (Meso Scale Discovery (MSD), R91AN-1) labeled anti-Aβ antibody. 50 ul of complex was added to blocked plate containing capture antibody to Aβ1-40. After overnight incubation at 2-8° C. with no shaking, plates were washed and 2×read buffer (MSD, R92TC-1) added. Plate was read using Meso Sector S 600 (MSD, IC0AA).

[0417] Brain shuttle containing mAbs BBBB383 and BBBB426 were observed to have faster plasma clearance than the anti-BACE mAb BBBB456 alone (FIG. 5A). However, the converse was true in the brain with BBBB383 and BBBB426 observed to have increased brain concentration at all timepoints over the control BBBB456. When the PD effect of BACE inhibition was measured, both brain shuttle mAbs were observed to inhibit the activity of BACE to a greater extent than the control anti-BACE mAb alone. (FIG. 5B).

[0418] Additional brain shuttle containing mAbs were similarly assessed at 4 and 24 hrs following 13 mg/kg i.v. dosing (FIG. 7A-B). Similar to the first study, all brain shuttle mAbs were observed to have faster plasma clearance than the control anti-BACE mAb. A range of brain concentration was observed for the brain shuttle mAbs with enhancement in brain concentration for all except BBBB974. It was hypothesized that BBBB974 did not traffic efficiently to the brain due to its binding kinetics. Specifically, BBBB974 has a slow neutral on-rate that may prevent efficient association with the TfR in vivo. A tripod mAb concentration dependent decrease in Aβ1-40 levels were also observed for all tripod mAbs except BBBB983, which had an increase in brain concentration over the control BBBB456 but no impact on Aβ1-40 concentration (FIG. 8). This observation may be due to the binding kinetics, as BBBB983 has a very slow neutral off-rate which may prevent the efficient diffusion in the brain that is necessary for BACE inhibition. These data underscore the importance of TfR binding kinetics for both the delivery and function of a therapeutic mAb.

[0419] The relationship between affinity and transcytosis efficiency has been described previously as improved transcytosis with decreased affinity for TfR (Yu, Zhang et al. 2011), a conclusion that is discrepant with the above data. To probe the transcytosis affinity relationship in more detail, nine tripod mAb were assessed for brain PK/PD in the mouse model described above. These tripod mAbs differed in affinity for the TfR by approximately 100-fold (K_{D} ranged from 0.2 nM-81 nM). Brain concentration was measured at 24 hours (C_{max brain}) following IV dosing (FIG. 17). As expected, a range of transcytosis efficiency was observed from no enhancement to ten-fold improvement over the control mAb. The data indicate a more nuanced relationship between affinity and transcytosis efficiency than what has been previously described, with influence from both on- and off-rates impacting brain concentration. For example, no enhancement in brain exposure for BBBB946 over the control mAb was observed, although it had a K_{D}=65 nM and a fast off-rate at pH 6. This mAb was unique though, having a slower on-rate than other mAbs under study (kₐ≈10³ M⁻¹ s⁻¹ compared with kₐ≈10⁵ M⁻¹ s⁻¹). In fact, when compared with another tripod antibody, BBBB969, with similar K_{D} (K_{D}=81 nM) but 100×faster on-rate the contrast is apparent. BBBB969 enhanced brain concentration by 5.5-fold demonstrating the importance of a sufficiently fast on-rate for efficient brain delivery. The efficiency of transcytosis for the other eight mAbs studied can be best described by their off-rates, with optimal brain delivery occurring at an off-rate that is neither too fast nor too slow (optimal neutral k_{d} of 2×10⁻³ s⁻¹). A strong PK/PD relationship was observed for all tripod mAbs except for BBBB983, which had 5.5×enhancement in brain concentration but no impact on Aβ₁₋₄₀ levels. This mAb has a slow neutral off-rate (<8×10⁻⁵ s⁻¹) which we hypothesize impacts its ability to diffuse in the brain to the target. Taken together the data demonstrate the importance of optimizing both the neutral on- and off-rates for optimal brain PK and PD. We observed no influence of binding epitope on TfR in the study (data not shown).

Selection of mAbs for Cyno Studies and Assessment of Brain Shuttles Fused to Anti-Tau mAb

[0420] Critical to confirming the ability of the TfR targeting tripod mAbs to enhance therapeutic antibody brain exposure in humans is demonstrating enhanced brain delivery in non-human primates. The best performing tripod mAbs in the mouse study (BBBB979 and BBBB978) did not bind to the cyno TfR and were therefore excluded from further study. The next best, BBBB970 and BBBB969, both contained a free cysteine residue in the light chain of the anti-TfR brain shuttle (SEQ ID NO: 162 and SEQ ID NO: 218). Since free cysteine residues can contribute to nonideal biophysical properties during manufacturing, the free cysteines were mutated to serine residues (SEQ ID NO: 278 and SEQ ID NO: 291).

[0421] The new scFvs were fused to the anti-Tau mAb, PT1B844 (SEQ ID NOs: 310 and 311) to generate BBBB1136 (SEQ ID NOs: 285, 286 and 287)/BBBB1134 (SEQ ID NOs: 288, 289 and 290), and BBBB1133 (SEQ ID NOs: 298, 299 and 300)/BBBB1131 (SEQ ID NOs: 301, 302 and 303) (IgG1 AAS YTE/IgG1). The affinity for huTfR was measured (Table 7).

TABLE 7
Binding affinity of anti-TfR brain shuttles for huTfR
with Cys-Ser mutations fused to the anti-Tau mAb

| | ka (1/Ms) | ka (1/Ms) | KD (M) |
|---|---|---|---|
| BBBB1131 | (2.53 ± 0.08)E+05 | (3.17 ± 0.05)E−02 | (1.25 ± 0.05)E−07 |
| BBBB1133 | (2.38 ± 0.04)E+05 | (3.23 ± 0.29)E−02 | (1.36 ± 0.15)E−07 |
| BBBB1134 | (2.12 ± 0.10)E+05 | (2.49 ± 0.11)E−03 | (1.18 ± 0.10)E−08 |
| BBBB1136 | (2.08 ± 0.15)E+05 | (2.26 ± 0.06)E−03 | (1.09 ± 0.11)E−08 |

[0422] BBBB1134/BBBB1136 maintained very similar binding to huTfR as BBBB557/BBBB970, indicating that neither the Cys-Ser mutation or fusion to the anti-Tau mAb perturbed the binding affinity for huTfR. However, BBBB1131/BBBB1133 was approximately 2-fold weaker in binding affinity compared with BBBB543/BBBB969. To determine if the shift in affinity was due to the cys-ser mutation or to fusion to the anti-Tau mAb, the brain shuttle without the mutation but fused to anti-Tau was generated and binding assessed (BBBB1048 (SEQ ID NOs: 178, 179 and 180)/BBBB1046 (SEQ ID NOs: 181, 182 and 183)). The affinity of the non-mutated BBBB1048/BBBB1046 was very similar to BBBB543/BBB969, indicating that the loss of affinity was due to the cys-ser mutation and not due to fusion to the Tau mAb (Table 8).

TABLE 8
Binding affinity of anti-TfR brain shuttles
for huTfR fused to the anti-Tau mAb

| | ka (l/Ms) | ka (l/Ms) | KD (M) |
|---|---|---|---|
| BBBB1046 | (2.63 ± 0.03)E+05 | (1.82 ± 0.15)E−02 | (6.91 ± 0.50)E−08 |
| BBBB1048 | (2.57 ± 0.14)E+05 | (2.06 ± 0.25)E−02 | (7.99 ± 0.71)E−08 |

[0423] Similar to previous studies, internalization was also assessed and fusion of the brain shuttle to anti-Tau mAb did not impact its ability to internalize in human brain endothelial cells (example in FIG. 9, mAbs tested are in Table 9).

TABLE 9
Anti-TfR brain shuttles assessed for internalization
in human brain endothelial cells.

| mAb | Internalized |
|---|---|
| BBBB1046 | Yes |
| BBBB1047 | Yes |
| BBBB1048 | Yes |
| BBBB1052 | Yes |
| BBBB1053 | Yes |
| BBBB1054 | Yes |
| BBBB1055 | Yes |
| BBBB1131 | Yes |
| BBBB1132 | Yes |
| BBBB1133 | Yes |
| BBBB1134 | Yes |
| BBBB1135 | Yes |
| BBBB1136 | Yes |

Cyno Pharmacokinetics of Anti-Tau Brain Shuttle mAbs

[0424] Cynomolgus monkeys were administered with test articles by IV injection (slow bolus) with the indicated dose. At the scheduled timepoints, cynomolgus monkey brain was collected and rinsed with cold saline solution following upper body perfusion with saline for minimum of 5 minutes. Predefined brain locations were isolated, snap frozen in liquid nitrogen, and stored at −80° C. until tissue homogenization and capillary depletion processing.

[0425] BBBB1133, BBBB1136 and BBBB1134 were dosed i.v. at 10 mg/kg along with the non-brain shuttle-enabled mAbs PT1B844 (FIG. 18) and PT1B916 in cynomolgus monkeys. Plasma was sampled at 4, 24 and 72 hours. Cynomolgus monkey brain was collected and rinsed with cold saline solution following upper body perfusion with saline for minimum of 5 minutes. Predefined brain locations were isolated, snap frozen in liquid nitrogen, and stored at −80° C. until tissue homogenization and capillary depletion processing.

[0426] For sample preparation of the capillary-depleted brain tissue lysates, individual tissue weights were obtained for the brain locations collected. The brain tissue samples were added to a calculated volume of modified dPBS buffer (2.5 μL buffer/l mg tissue) containing protease inhibitor (Pierce; A32955) and transferred to Lysing Matrix D (MP Biomedicals™; 6913-100) tubes. Tissue samples were homogenized at 2.9 m/s for 15 seconds using a Bead Ruptor 24 Elite (Omni International). The total cell suspension was transferred into a new tube and mixed with an equal volume of a 26% dextran buffer (13% final dextran concentration). Mixed tissue homogenate was centrifuged at 2,000g for 10 minutes at 4° C. Carefully, the upper layer (capillary-depleted fraction) was separated from the remaining sample and transferred to a new tube containing 10×RIPA lysis buffer (Millipore™; 20-188). Capillary-depleted samples plus lysis buffer were vortexed well, centrifuged at 14,000 rpm for 30 minutes at 4° C., and supernatant transferred to a new tube. Brain tissue sample lysates were either stored frozen at −70° C. or measured for protein concentrations using BCA protein assay kit (Pierce™; 23227). Final brain tissue sample lysates were normalized to 7 mg/mL total protein concentration prior to immunoassay determination of BBB-enabled mAbs.

[0427] The concentration of BBB-enabled mAbs in cynomolgus monkey brain tissue for PK assessment was determined using MSD® ECLIA technology developed in a typical sandwich immunoassay format. The assay was performed on MSD Gold™ Small Spot Streptavidin 96-well plates. The streptavidin-coated plates were blocked with 1% bovine serum albumin (BSA) in 1×phosphate buffered saline (PBS) for 30 minutes at room temperature. The standard curve was prepared fresh in 50% naïve cyno brain tissue lysates by serial dilution. Frozen QCs prepared in naïve cyno brain tissue lysates at 2× of the working assay concentration were diluted and tested with each assay. Master mix containing the capture (biotinylated anti-human Fc mAb, 1 μg/mL) and detection (ruthenium-labeled anti-human Fc mAb, 0.5 μg/mL) reagents was combined with diluted standards, QCs, and samples at a 1:1 volume ratio in the assay plate. The mixture was incubated for 1 hour with shaking at room temperature. Assay plates were washed, and MSD T read buffer (1×) was added to all wells. Raw data values were read on an MSD SECTOR® S600 imager. The standard curve range for the assay was tested at 1-512 ng/mL with a minimum required sample dilution (MRD) of 1:2, yielding a limit of sensitivity of 2 ng/mL in brain tissue lysates. The MSD output files with the raw ECL counts were imported into Watson LIMS (Thermo Scientific) and then regressed with a 5-parameter logistic fit with 1/F2 weighting.

[0428] The concentration of BBB-enabled mAbs in cynomolgus monkey plasma for PK assessment was determined using MSD® ECLIA technology developed in a typical sandwich immunoassay format. The assay was performed on MSD Gold™ Streptavidin 96-well plates, the streptavidin-coated plates blocked with 1% bovine serum albumin (BSA)+0.5% Tween-20 in 1×phosphate buffered saline (PBS) for 30 minutes at room temperature. The standard curve was prepared fresh in 10% pooled cyno plasma by serial dilution. Frozen QCs prepared in pooled cyno plasma at 10× of the working assay concentration were diluted and tested with each assay. Master mix containing the capture (biotinylated anti-human Fc mAb, 1 μg/mL) and detection (ruthenium-labeled anti-human Fc mAb, 1 μg/mL) reagents was combined with diluted standards, QCs, and samples at a 1:1 volume ratio in the assay plate. The mixture was incubated with shaking for 1 hour at room temperature. Assay plates were washed, and MSD T read buffer (1×) was added to all wells. Raw data values were read on an MSD SECTOR® S600 imager. The standard curve range for the assay was tested at 2-512 ng/mL with a minimum required sample dilution (MRD) of 1:10, yielding a limit of sensitivity of 20 ng/mL in plasma matrix. The MSD output files with the raw ECL counts were imported into Watson LIMS (Thermo Scientific) and then regressed with a 5-parameter logistic fit with 1/y2 weighting.

[0429] Brain concentration was determined for the mAbs across a variety of areas (FIG. 10). Brain concentration data were averaged across animals, and each symbol represents a region of the brain. A 7×, 11× and 11× greater brain concentration was observed for BBBB1134, BBBB1136 and BBBB1133 respectively, compared with the control mAb. All brain shuttle containing mAbs had increased brain exposure over the non-brain shuttle containing mAbs in every region of the brain (FIG. 11).

[0430] The concentration of mAb in plasma was also determined (FIG. 12). Evidence for TMDD was observed in the periphery, with the tripod mAbs having accelerated clearance over the control mAb (FIG. 18). The impact of binding to the neonatal Fc receptor (FcRn) was evaluated in this study with BBBB1134 and BBBB1136 being identical except in the Fc domain with BBBB1136 having the “YTE” mutation (Dall'Acqua, K, et al. 2006). The “YTE” mutation enhances binding to FcRn at acidic pH and has been demonstrated to increase the half-life of mAbs in multiple species, including humans (Robbie, C, et al. 2013). As would be anticipated, the addition of the “YTE” mutation resulted in an increased plasma concentration for BBBB1136 compared with BBBB1134. While FcRn is a critical receptor in maintaining IgG homeostasis and extending the serum half-life of IgG in humans (Roopenian and Akilesh 2007) it has also been implicated as a reverse transcytosis, or efflux, receptor from the brain (Cooper, C, et al. 2013). We were interested in understanding the interplay between these two functions for FcRn, as improving half-life by increasing the binding affinity for FcRn may have come at the expense of brain exposure with increased brain efflux. Interestingly, the 2-fold increase in plasma concentration was mirrored by a 2-fold increase in brain concentration suggesting that any potential increase efflux is negligible in this system.

[0431] BBBB1133 had a peripheral half-life most like the mAbs without the brain shuttle, PT1B844 and PTIB916.

### Reticulocyte Depletion in Cynomolgus Monkey

[0432] A known liability for TfR targeting to enhance brain exposure is reticulocyte depletion due to antibody-dependent cell-mediated cytotoxicity (ADCC) of reticulocytes in an Fc-dependent fashion (Science Translational Medicine 2013: Vol. 5, 183). mAbs were tested with WT IgG1 (BBBB1134) and the mutations “AAS” (BBBB1136 and BBBB1133) to reduce FcγR binding for reticulocyte depletion in the cyno PK study. As expected, rapid reticulocyte depletion was observed for the WT IgG1 tripod mAb, BBBB1134, but not observed for BBBB1136, BBBB1133 or the non-brain shuttle mAbs PT1B844 and PT1B916 (FIG. 13), confirming the impact of Fc function on TfR binding mAbs and reticulocyte depletion.

[0433] A third tripod mAb, BBBB1133, was selected for dose-response and repeat dosing cynomolgus monkey PK. Cynomolgus monkeys were dosed intravenously at 2, 10 and 30 mg/kg and brain PK determine 48 hours, 7- and 14-days later. Plasma PK was assessed over two weeks (FIGS. 18A and B). Linear brain PK was observed between 2 and 10 mg/kg and nonlinear brain PK between 10 and 30 mg/kg. The proposed mechanism of delivery is receptor-mediated, which will be saturable, and the data indicated that 30 mg/kg is a saturating dose in cynomolgus. Linear PK was observed in plasma and CSF with a half-life of approximately 6 days. Repeat dosing was also completed using the same dose ranges dosed weekly for three weeks (FIGS. 18C and D). Evidence for accumulation with repeated dosing of 30 mg/kg was observed and is aligned with the previous observation that 30 mg/kg is a saturating dose. Linear PK was observed once again the periphery with no evidence for PK tolerance with repeat dosing.

[0434] The reticulocyte data indicated that effector silent Fc mAbs are required for the safe dosing of this brain delivery platform. While avoiding reticulocyte depletion is an important characteristic for the safety of the therapeutic mAb, this requirement though would prevent using anti-TfR mediated brain delivery for any therapeutic mAb that requires effector function, like ADP, for the therapeutic mechanism of action. For example, one potential therapeutic mechanism of action relies on Fc-dependent microglia phagocytosis of Tau aggregates. By inhibiting the ability of the brain shuttle mAb to bind to FcγR to prevent reticulocyte depletion, the mAb would not be able to bind FcγR on microglia cells to promote phagocytosis of Tau aggregates.

[0435] To explore alternative pathways for ADP, we assessed the ability of the effector silent tripod mAbs, BBBB1133 and BBBB1136, to induce phagocytosis of Tau oligomers in human IPSC derived microglia cells. Both tripod mAbs induced greater phagocytosis of Tau oligomers than the control anti-Tau mAb, PT1B844, an IgG1 mAb (FIG. 19A). The ADP of Tau oligomers by BBBB1133 has been demonstrated to occur through TfR mediated internalization and can be blocked with the addition of an excess of soluble TfR extracellular domain. Addition of excess of soluble Fc does not impact ADP, confirming that non-classical ADP utilizes the TfR and not FcγRs (FIG. 19B). Similar intracellular trafficking of Tau was observed for BBBB1133 as the control mAb (PT1B844) through early endosomes (EEA1) to intermediate endosomes (Rab17) and finally the lysosome (LAMP1) (FIG. 19C).

[0436] To further validate non-classical ADP as a physiological relevant mechanism for Tau degradation by microglia, we assessed the ability of the tripod mAbs to induce phagocytosis of human postmortem Alzheimer's disease brain-derived tau fibrils (PHF-Tau). ADP of PHF-Tau was measured in both human monocyte derived macrophages and human IPSC derived microglia cells (FIG. 20). Both PT1B844 and BBBB1133 induced the phagocytosis of PHF-Tau at early timepoints. However, at the later timepoints BBBB1133 continues to induce ADP of PHF-Tau while PT1B844 mediated ADP stalls. This could be evidence for macrophage and microglial exhaustion as has been described for classical ADCP (Church, VanDerMeid et al. 2016) and a potential advantage of non-classical ADP mechanism utilized by BBBB1133. Similar to the previously described experiment using Tau oligomers, uptake of Tau is blocked with addition of an excess amount of soluble TfR demonstrating that this is a TfR-dependent mechanism. To probe another potential advantage of non-classical ADP over classical ADP, pro-inflammatory cytokines were measured in the PHF Tau phagocytosis experiment. As expected, classical ADP mediated by PT1B844 resulted in the secretion of proinflammatory cytokines while non-classical ADP mediated by BBBB1133 did not.

[0437] To assess the potential of the AAS IgG1 tripod mAbs to promote uptake of Tau aggregates in microglia cell, human microglia derived from Induced Pluripotent Stem Cells (iPSC) were plated onto 384 well Perkin Elmer Cell Carrier Ultra plates at a dilution of 7000 cells per well and maintained in advanced DMEM/F12 media with Glutamax+, Penicillin/Streptomycin, IL34 (100 ng/ml), and GMCSF (10 ng/ml). On the day of the assay, biotinylated phospho-tau oligomers [sequence: SCBiot-(dPEG4)GTPGSRSR(pT)PSLP(pT)PPTREPLL (SEQ ID NO: 315)-amide] were allowed to complex with streptavidin Alexa Fluor 488 (AF488) at 15-fold molar excess. Labelled phospho-tau oligomers were then allowed to bind test mAbs at approximately 2×molar excess at room temperature for 30 minutes. The mAb:tau oligomer complex was then delivered to microglia at 20 ul/well. At 2, 4, and 8 hours post incubation, cells were washed twice with phosphate buffered saline (PBS) and fixed in the presence of 4% paraformaldehyde for 15 minutes at room temperature. Following fixation, cells were once again washed twice in PBS and incubated overnight with LAMP1 primary antibody, a marker for lysosomes, at a concentration of 4 ug/ml in permeabilization buffer (0.1% saponin+1% Fish skin gelatin) at 4° C. Post incubation, cells were washed twice with PBS and stained with 1 ug/ml secondary antibody conjugated to Alexa Fluor 647 in permeabilization buffer for 1 hour at 4° C. Post incubation, cells were washed twice with PBS, counter-stained with Hoechst DNA stain at 1 ug/ml for 10 minutes at room temperature in PBS. The cells were then washed one final time in PBS, resuspended in 20 ul of PBS per well and imaged on the Opera Phenix confocal high content microscope. Acquired images were analyzed using Harmony and ImageJ analysis software. Approximately 500 cells per condition were scored for the presence of Tau oligomers within phagolysosomal structures, and labelled with LAMP1 antibody.

[0438] All brain shuttle mAbs promoted more efficient uptake into phagosomes than the non-brain shuttle mAb, PT1B844 (FIG. 15). Within the brain shuttle mAbs those with full effector function (BBBB1131, 1134 and 1046) were more efficient than those without effector function. These data demonstrate that eliminating binding to FcγR to reduce the risk of reticulocyte depletion should not impact therapeutic efficacy of the anti-Tau mAbs. In fact, TfR-mediated internalization and trafficking to the phagolysosome appears more efficient in microglia than did traditional FcγR mediated phagocytosis.

[0439] To explore if the observation could be repeated using other targets and cells, the uptake of RSV F-protein was assessed in human macrophages. Primary human macrophages were plated onto 384 well Perkin Elmer Cell Carrier Ultra plates at a dilution of approximately 6000 cells per well and cultured in X-VIVO 10 serum-free hematopoietic cell medium supplemented with 10% FBS, 50 mg/ml macrophage colony-stimulating factor (mCSF) CSF and 25 ng/ml interferon gamma (IFNγ). On the day of the assay, approximately 7-fold molar excess RSV-F protein (His-tagged F protein complexed with anti-His biotinylated antibody and streptavidin Alexa Fluor 488) was allowed to bind anti-RSV mAbs (1 ug/ml) at room temperature for 30 minutes. The mAb:F protein complex was then delivered to macrophages at 20 ul/well. Alexa Fluor 488 labelled E. Coli served as a positive control for phagocytosis. 3 hours post incubation, cells were washed twice with phosphate buffered saline (PBS) and fixed in the presence of 4% paraformaldehyde for 15 minutes at RT. Following fixation, cells were once again washed twice in PBS and incubated overnight with LAMP1 primary antibody, a marker for lysosomes, at a concentration of 4 ug/ml in permeabilization buffer (0.1% saponin+1% Fish skin gelatin) at 4° C. Post incubation, cells were washed twice with PBS and stained with 1 ug/ml secondary antibody conjugated to Alexa Fluor 647 in permeabilization buffer for 1 hour at 4° C. Post incubation, cells were washed twice with PBS, counter-stained with Hoechst DNA stain at 1 ug/ml for 10 minutes at room temperature in PBS. The cells were then washed one final time in PBS, resuspended in 20 ul of PBS per well and imaged on the Opera Phenix confocal high content microscope. Acquired images were analyzed using Harmony and ImageJ analysis software. Approximately 300 cells per condition were scored for the presence of F protein foci within phagolysosomal structures, labelled with LAMP1 antibody.

[0440] As was observed for Tau and microglia cells, all brain shuttle mAbs promoted more efficient uptake into phagosomes than the non-brain shuttle mAb, B21M-IgG1 (FIG. 16). However, a difference in uptake between IgG1 (BBBB932 and BBBB934) and IgG1 AAS (BBBB354 and BBBB368) brain shuttle mAbs was not observed. It remains to be determined if a difference between the B21M experiment and the Tau experiment (FIG. 15 and FIG. 16) is due to the target or the cells. Regardless, the data confirm the robustness of the mechanism where TfR-mediated internalization and trafficking to the phagolysosome appears at least as efficient as traditional FcγR mediated phagocytosis.

[0441] To the knowledge of the inventors, there has not been any publication describing exploiting this non-classical ADP mechanism for a therapeutic mAb. While not wishing to be bound by theories, it is believed that phagocytosis and endocytosis can both lead to degradation through the convergence of the phagolysosomal paths, such that regardless of the internalization trigger (FcγR mediated phagocytosis or TfR-mediated endocytosis), the internalized cargo is trafficked to and degraded by the phagolysosome.

Assessment of the PK/PD Relationship in the Retina of huTfR Mice

[0442] Selected anti-TfR brain shuttles were then fused to a prototypical anti-BACE (β-secretase) mAb and binding affinity was reassessed using same method as described above. As shown in Table 5, the affinity of the anti-TfR brain shuttles was similar when fused to B21M mAb (anti-human respiratory syncytial virus) and anti-BACE antagonist mAb. Internalization was assessed for selected molecules (FIG. 4) and found unchanged from internalization observed when the anti-TfR brain shuttle was fused to B21M mAb.

[0443] Since none of the anti-TfR brain shuttles bound to mouse or rat TfR, in vivo rodent studies will be conducted in huTfR knock-in mice (C57BL/6-Tfrctm2618(TFRC)Arte mice (Taconic Artemis)) using the prototypical anti-BACE antagonist mAb (BBBB970, BBBB978, BBBB983). The anti-BACE antagonist mAb was selected as a model PD system for measuring inhibition of BACE1 (through the concentration of its product peptide, Aβ1-40), a reflection of the amount of mAb that was trafficked to the brain.

[0444] The first in vivo study will assess the PK/PD relationship in the retina of huTfR mice. The knock-in (KI) mice will be dosed at 10 mg/kg i.v. with the BBBB970, BBBB978, BBBB983 and the control BBBB456. Eyes and plasma will be harvested at 4- and 24-hours following dosing. At the scheduled timepoints, mice will be anesthetized by inhalation of isoflurane. Mouse eyes from KI mice will be collected following whole-body perfusion with 5 mL of 0.9% saline solution. The collected eye sample (minus the optic nerve) will be snap frozen in liquid nitrogen, and stored at −70° C. until tissue homogenization or prepared for immunohistochemistry.

[0445] BACE activity measurements will be made by homogenizing mouse eyes in lysing matrix D tube (8 μl of 0.4% DEA/50 mM NaCl per mg of brain weight, Fast Prep-24 at 6/shakes/sec for 20 sec). Tubes will then be centrifuged at 4° C. for 5 min in an Eppendorf Centrifuge set to a maximum speed. Homogenate (supernatant) will then transferred to precooled tubes which were then centrifuged for 70 minutes at 13,000 rpm at 4° C. Supernatant will then be transferred to a tube containing 10% of 0.5 M Tris/HCL and frozen at −80° C. until assayed. Aβ 1-40 peptide standards and thawed processed eye homogenate are then pre-complexed at 1:1 with ruthenium (Meso Scale Discovery (MSD), R91AN-1) labeled anti-Aβ antibody. 50 ul of complex will be added to blocked plate containing capture antibody to Aβ 1-40. After overnight incubation at 2-8° C. with no shaking, plates will be washed and 2×read buffer (MSD, R92TC-1) added. Plate will be read using Meso Sector S 600 (MSD, IC0AA).

### Cytokine Secretion Analysis

[0446] After different treatments on human iPSC-derived microglia, the relative concentrations of secreted proteins in cell supernatants were measured using antibody-based 29-plex immunoassays (Luminex, R&D systems, Cat. # LXSAHM-29). The 29 secreted proteins were: BDNF, CCL3/MIP1α, CCL20/MIP3α, Groβ/MIP2, CXCL10/IP10/CRG2, GCSF, IFNα, IL1α, IL2, IL6, IL10, IL17/IL17α, MCSF, RAGE/AGER, TNFα, CCL2/JE/MCP1, CCL4/MIP1β, CXCL9/MIG, FGFb/FGF2, GMCSF, IFNγ, IL1β, IL4, IL8/CXCL8, IL12p70, IL23, MMP9, Resistin.

### PHF Tau

[0447] Postmortem tissue from the cortex obtained from 5 histologically confirmed AD patient (Braak stage V-VI) was used to generate a pool of partially purified PHF by a modified method of (Mercken et al., Acta Neuropathologica (1992) 84: 265-272: Greenberg, et al. J. biol. Chem. (1992) 267: 564-569). Typically, 5 g of parietal or frontal cortex was homogenized in 10 volumes of cold buffer H (10 mM Tris, 800 mM NaCl, 1 mM EGTA and 10% sucrose/pH 7.4) using a glass/Teflon Potter tissue homogenizer (IKA Works, Inc; Staufen, Germany) at 1000 rpm. The homogenized material was centrifuged at 27000×g for 20 min at 4° C. The pellet was discarded, and the supernatant was adjusted to a final concentration of 1% (w/v) N-lauroylsarcosine and incubated for 2 h at 37° C. Subsequently, the supernatant was centrifuged at 184000×g for 90 min at 20° C. The pellet was carefully washed in PBS and resuspended in 750 uL PBS, aliquoted and frozen at −80° C. The quality of the PHF-tau preparations was evaluated by the use of AT8/AT8 phospho-aggregate selective MSD ELISA. Tau content was determined by western blotting using hTau10 (Janssen R&D) with recombinant 2N4R tau as calibrant.

### Study Re the Ability of the TfR TTP mAb to Potentiate ADP In Vivo

[0448] The ability of the TfR TTP mAb to potentiate ADP in vivo was studied in a mouse model of Tau seeding. The mouse model employed transgenic Tau-P301L mice, expressing the longest human tau isoform with the P301L mutation (tau-4R/2N-P301L) (Terwel, et al. (2005) J Biol Chem; 280(5): 3963-73). Due to the lack of mouse TfR cross-reactivity of the TTPs, a mouse surrogate TTP was developed to have similar binding properties to the lead human TfR TTP and used in this study. The model of Tau seeding involves stereotactic hippocampal injections of PHF-Tau, which induces a dose-dependent increase in tau aggregation (Vandermeeren, et al., J Alzheimers Dis. (2018); 65(1): 265-281). Following co-injection of mAbs, neutralization of Tau seeding by different anti-tau mAbs has demonstrated that the model is partially dependent upon Fc-mediated ADP of Tau (FIG. 21A). While both anti-Tau mAbs neutralized Tau seeding compared with the isotype control, a statistically significant difference is observed between the mAb with effector function (mouse IgG2a) and the mAb without effector function (mouse IgG2aσ (Vafa, et al., Methods. 2014 Jan. 1; 65(1): 114-26)), demonstrating the partial dependence of the model on mAb effector function.

[0449] A similar study was completed comparing the anti-Tau mAb, PTIB844 with a mouse IgG2a Fc, to the PT1B844 TTP mAb with a human IgG1 AAS Fc. Co-injection of mAbs was utilized to normalize for any differences in PK properties between the mAb and the TTP mAb. Both anti-Tau mAbs neutralized Tau seeding compared with the isotype control. TTP mAb displayed at least the same compared to the mAb with full Fc effector function, suggesting that non-classical ADP mechanism is functional in vivo (FIG. 21B).

### Stereotactic Injection of PHF in P301L Mice

[0450] PHF tau seeding studies, including the currently described study, are performed in compliance with protocols approved by the local ethical committee (628-Tau Spread, Janssen Pharmaceutica) and national institutions adhering to AAALAC guidelines. Mice expressing the longest human tau isoform with the P301L mutation (tau-4R/2N-P301L) (Terwel et al., 2005; Peeraer et al., 2015) were single housed in an enriched environment, individually ventilated cages and under 12/12 h light/dark cycles (light on at 6:00 AM). At the age of 90+/−7 days, mice were randomized over treatment groups and gender and received a unilateral injection in the right hippocampus (CA1) of AD-derived PHFs (in the presence of anti-IgG2a (n=19); anti phospho Tau mouse IgG2a (n=20) or anti-phospho Tau-TTE (n=20).

[0451] Tau.P301L mice were deeply anaesthetized with isoflurane (5% in 36% oxygen) and fixed in a stereotactic frame (Stoelting-Neurostar combination). During the further procedure a 2% isoflurane level was maintained. A 30G syringe (Hamilton) was used for injecting 3 μL in the right hemisphere at a speed of 0.25 μl/min at the selected coordinates: anteroposterior −2.0, mediolateral +1.6 from bregma, dorsoventral 1.4 mm from dura. Body weight was monitored before and weekly after injection, and no differences were observed between treatment and control groups for all injection experiments (not shown).

[0452] Two months after injection, mice were sacrificed by decapitation and brain tissue from the ipsilateral hemisphere was snap frozen. Before extraction, tissue was weighed and homogenized in 600 μL of buffer H per 100 mg tissue (10 mM Tris, 800 mM NaCl, 1 mM EGTA and 10% sucrose/pH 7.4). The homogenate was centrifuged at 27 000×g for 20 min and supernatant was frozen at −80° C.

### Biochemical Analysis MesoScale Discovery (MSD)

[0453] Coating antibody (AT8) was diluted in PBS (1 μg/mL) and aliquoted into MSD plates (30 μL per well) (L15XA, MSD, Rockville, Md., USA), which were incubated overnight at 4° C. After washing with 5×200 μL of PBS/0.5% Tween-20, the plates were blocked with 0.1% casein in PBS and washed again with 5×200 μl of PBS/0.5% Tween-20. After adding samples and standards (both diluted in 0.1% casein in PBS), the plates were incubated overnight at 4° C. Subsequently, plates were washed with 5×200 μL of PBS/0.5% Tween-20, and SULFO-TAG™ conjugated detection antibodies (AT8) in 0.1% casein in PBS were added and incubated for 2 h at room temperature while shaking at 600 rpm. After a final wash (5×200 μL of PBS/0.5% Tween-20), 150 μL of 2× buffer T (MSD) was added, and plates were read with an MSD imager. Raw signals were normalized against a standard curve consisting of 16 dilutions of a sarcosyl-insoluble prep from postmortem AD brain (PHF) and were expressed as arbitrary units (AU) PHF. Statistical analysis (ANOVA with Bonferroni correction for multiple testing) was performed with the GraphPad prism software. P-values <0.05 were considered as significantly different.

### Discussion

[0454] To achieve an optimized brain delivery platform based on receptor mediated transcytosis, mAbs were generated that bind specifically to the human transferrin receptor (huTfR) with a range of affinities in a pH-dependent manner. The relationship between TfR binding affinity and transcytosis efficiency has been covered extensively in numerous publications with a focus on the equilibrium dissociation constant, K_{D}. While K_{D} is an important measure, it has been surprisingly demonstrated in the invention the criticality of the binding kinetics, kₐ and kₐ, for transcytosis. Inventors discovered that both on- and off-rates need to be optimized for efficient transcytosis and pharmacodynamic activity of the therapeutic mAb delivered. Based on the results, optimal transcytosis occurs when, for example, the kₐ≥10⁵ M⁻¹ s⁻¹ and neutral k_{d}=2×10⁻³ sec⁻¹. While not wishing to be bound by theories, it is hypothesized the interplay between on-rate and off-rate is critical to ensuring efficient transcellular transport through the diverse intracellular vesicles responsible for protein trafficking in polarized cells

[0455] It has been demonstrated that dosing tripod mAbs in cynomolgus monkeys results in 6-12×enhancement in brain concentration over a control mAb. Increasing acidic FcRn binding resulted in reduced peripheral clearance and enhanced brain concentration. Under normal physiological conditions, FcRn-mediated efflux of antibodies from the brain is likely crucial in maintaining brain homeostasis by avoiding unwanted inflammation and immune responses in the brain (Schlachetzki, Zhu et al. 2002, Roopenian and Akilesh 2007). While the preponderance of evidence suggests a strong role for FcRn-mediated efflux of antibodies, there does remain some debate about this clearance mechanism (Garg and Balthasar 2009, Abuqayyas and Balthasar 2013). Inventors discovered that increasing the binding affinity for FcRn has a positive impact on both peripheral and brain concentration, suggesting that any enhanced efflux is insignificant in this system. Dose response experiments in cynomolgus monkeys using a tripod mAb demonstrated the saturability of the mechanism of transport, which occurs at 30 mg/kg in this species. Extensive repeat dosing, dose response characterization was also completed in cynomolgus and will aid greatly in predicting human doses and the utility of this platform for specific therapeutic applications.

[0456] Reticulocyte depletion is a known safety liability for TfR binding antibodies. It was observed by the inventors that indeed acute and nearly complete reticulocyte depletion can be observed with an effector function competent mAb. Numerous approaches have been described to avoid this depletion, including reducing effector function {Couch, 2013 #589} and through molecular architecture {Weber, 2018 #590}. While inventors utilized a very similar architecture to one that has been described as sterically capable of attenuating peripheral effector function, they observed robust reticulocyte depletion with the effector function competent mAb.

[0457] The clear disadvantage to Fc mutagenesis is the elimination of effector function from the therapeutic mAb. For many therapeutic targets in the brain, like beta-amyloid and Tau, ADP is believed critical to efficacy. Previous work has demonstrated that recycling receptors, including TfR, can be excluded from sorting tubules and diverted to lysosomes by multivalent cargo binding (Marsh, 1995, J Cell Biol (1995) 129 (6): 1509-1522; Weflen, 2013 Mol Biol Cell. 2013 Aug. 1; 24(15): 2398-24050. Inventors demonstrated that this endogenous diversion of multivalent cargo can be used as an alternative, non-classical, non-FcγR mechanism of ADP. Tau internalized through non-classical and classical ADP are trafficked similarly in microglia, with Tau aggregates trafficking through the endolysosomal system to the lysosome for degradation. The described non-classical ADP can be exploited for a variety of therapeutic applications where ADP is necessary for efficacy but classical ADP harmful for safety.

[0458] The data indicate that non-classical ADP is more efficient than classical ADP, potentially due to inherent differences in the binding and internalization between FcγRs and TfR. FcγR mediated internalization requires receptor clustering by the mAb, while TfR is rapidly internalizing and recycling independent of mAb binding. A second potential explanation is macrophage and microglial exhaustion (Zent, 2017 FEBS J. 2017 April; 284(7):1021-1039). Macrophage exhaustion appears to be dependent upon the length of time the macrophage is exposed to the target (Church, VanDerMeid et al. 2016, Clin Exp Immunol. 2016 January; 183(1):90-101) (Mukundan, 2009, Nat Med. 2009 November; 15(11):1266-72), which is aligned with our observation of that classical ADP stalls with time. Observations for macrophage exhaustion have been made in vitro and in patients, indicating that this exhaustion phenotype may impact therapeutic efficacy of mAbs with effector function. The non-classical ADP offers an efficacy advantage, avoiding this exhaustion phenotype by mediating ADP without activating microglia by binding FcγRs.

[0459] Another advantage of non-classical ADP is that by avoiding microglial activation ADP occurs without stimulating the production pro-inflammatory cytokines. There remains debate on the safety of using effector-function competent mAbs in treating diseases in the brain, particularly around increasing neuroinflammation in patients who already suffer from chronic neuroinflammation (reviewed in {Heneka, 2015 #591}). In addition, there is increasing attention to the role that inflammation plays in the pathogenesis of neurodegenerative disease with the implications of increasing inflammation, as well as, the ability to engage or further activate potentially already exhausted microglia under debate. For example, the toxic impact of classic ADP on neurons was been demonstrated and hypothesized that effector function competent mAbs may pose safety risks {Lee, 2016 #592}. The non-classical ADP mechanism described here avoids the potential neuroinflammation liabilities by potentiating efficient clearance of Tau without needing to activate microglia or stimulate release of proinflammatory cytokines. In conclusion, a robust brain delivery platform has been characterized for pharmacokinetics, pharmacodynamics and safety establishing the robust preclinical characterization needed to advance to clinical trials.

[0460] When formatted as scFv brain shuttles and fused to a prototypical anti-BACE (beta-secretase) antagonist mAb, a 4-10×improvement in brain concentration was observed over the anti-BACE mAb alone following i.v. dosing of transgenic mice expressing huTfR. A strong PK:PD relationship was also noted, with a dose dependent decrease in beta-amyloid detected. The best performing brain shuttles enhanced brain delivery more than competitor molecules, achieving best-in-class delivery through optimized binding interactions between the brain shuttle and huTfR.

[0461] The optimized brain shuttles were then fused to PT1B844, a Tau binding mAb. Brain shuttles fused PT1B844 demonstrated 6 to 16-fold improvement in brain concentration when dosed i.v. in cynomolgus monkey. Similar to the mouse data, the enhancement in brain concentration exceeded the best brain shuttles reported in literature. In addition to superior brain PK, the brain shuttles are engineered to reduce Fc-mediated effector function and do not induce rapid reticulocyte depletion in cynomolgus as has been reported by competitors. Importantly, the loss of Fc-function doesn't impact the effectiveness of the therapeutic Tau mAb, as the brain shuttle is more efficient at mediating microglial uptake of Tau than PT1B844 alone.

[0462] It will be appreciated by those skilled in the art that changes could be made to the embodiments described above without departing from the broad inventive concept thereof. It is understood, therefore, that this invention is not limited to the particular embodiments disclosed, but it is intended to cover modifications within the spirit and scope of the present invention as defined by the appended claims.

### CITATIONS

[0463] Abuqayyas, L. and J. P. Balthasar (2013). “Investigation of the role of FcgammaR and FcRn in mAb distribution to the brain.” Mol Pharm 10(5): 1505-1513.
[0464] Church, A. K., K. R. VanDerMeid, N. A. Baig, A. M. Baran, T. E. Witzig, G. S. Nowakowski and C. S. Zent (2016). “Anti-CD20 monoclonal antibody-dependent phagocytosis of chronic lymphocytic leukaemia cells by autologous macrophages.” Clin Exo Immunol 183(1): 90-101.
[0465] Cooper, P. R., G. J. Ciambrone, C. M. Kliwinski, E. Maze, L. Johnson, Q. Li, Y. Feng and P. J. Homby (2013). “Efflux of monoclonal antibodies from rat brain by neonatal Fc receptor, FcRn.” Brain Res 1534: 13-21.
[0466] Dall'Acqua, W. F., P. A. Kiener and H. Wu (2006). “Properties of human IgG1s engineered for enhanced binding to the neonatal Fc receptor (FcRn).” J Biol Chem 281(33): 23514-23524.
[0467] Garg, A. and J. P. Balthasar (2009). “Investigation of the influence of FcRn on the distribution of IgG to the brain.” AAPS J 11(3): 553-557.
[0468] Goulatis, L. I. and E. V. Shusta (2017). “Protein engineering approaches for regulating blood-brain barrier transcytosis.” Curr Opin Struct Biol 45: 109-115.
[0469] Johnsen, K. B., A. Burkhart, F. Melander, P. J. Kempen, J. B. Vejlebo, P. Siupka, M. S. Nielsen, T. L. Andresen and T. Moos (2017). “Targeting transferrin receptors at the blood-brain barrier improves the uptake of immunoliposomes and subsequent cargo transport into the brain parenchyma.” Sci Rep 7(1): 10396.
[0470] Robbie, G. J., R. Criste, W. F. Dall'acqua, K. Jensen, N. K. Patel, G. A. Losonsky and M. P. Griffin (2013). “A novel investigational Fc-modified humanized monoclonal antibody, motavizumab-YTE, has an extended half-life in healthy adults.” Antimicrob Agents Chemother 57(12): 6147-6153.
[0471] Roopenian, D. C. and S. Akilesh (2007). “FcRn: the neonatal Fc receptor comes of age.” Nat Rev Immunol 7(9): 715-725.
[0472] Schlachetzki, F., C. Zhu and W. M. Pardridge (2002). “Expression of the neonatal Fc receptor (FcRn) at the blood-brain barrier.” J Neurochem 81(1): 203-206.
[0473] Vandermeeren, M., M. Borgers, K. Van Kolen, C. Theunis, B. Vasconcelos, A. Bottelbergs, C. Wintmolders, G. Daneels, R. Willems, K. Dockx, L. Delbroek, A. Marreiro, L. Ver Donck, C. Sousa, R. Nanjunda, E. Lacy, T. Van De Casteele, D. Van Dam, P. P. De Deyn, J. A. Kemp, T. J. Malia and M. H. Mercken (2018). “Anti-Tau Monoclonal Antibodies Derived from Soluble and Filamentous Tau Show Diverse Functional Properties in vitro and in vivo.” J Alzheimers Dis 65(1): 265-281.
[0474] Yu, Y. J., J. K. Atwal, Y. Zhang, R. K. Tong, K. R. Wildsmith, C. Tan, N. Bien-Ly, M. Hersom, J. A. Maloney, W. J. Meilandt, D. Bumbaca, K. Gadkar, K. Hoyte, W. Luk, Y. Lu, J. A. Ernst, K. Scearce-Levie, J. A. Couch, M. S. Dennis and R. J. Watts (2014). “Therapeutic bispecific antibodies cross the blood-brain barrier in nonhuman primates.” Sci Transl Med 6(261): 261ra154.
[0475] Yu, Y. J., Y. Zhang, M. Kenrick, K. Hoyte, W. Luk, Y. Lu, J. Atwal, J. M. Elliott, S. Prabhu, R. J. Watts and M. S. Dennis (2011). “Boosting brain uptake of a therapeutic antibody by reducing its affinity for a transcytosis target.” Sci Transl Med 3(84): 84ra44.
[0476] Zent, C. S. and M. R. Elliott (2017). “Maxed out macs: physiologic cell clearance as a function of macrophage phagocytic capacity.” FEBS J 284(7): 1021-1039.

The application's sequence listing, which the Patent Office published only in electronic form, follows.

SEQUENCE LISTING (559 sequences)

SEQ ID NO: 1 - protein, 683 aa, Homo sapiens
DYKDDDDKGRLYWSDLQAMFLQFLGEGRLEDTIRQTSLRERVAGSAGMAALTQDIRAALSRQKLDHVWTDTHYVGLQFPDPAHPNTLHWVDEAGKVGEQLPLEDPDVYCPYSAIGNVTGELVYAHYGRPEDLQDLRARGVDPVGRLLLVRVGVISFAQKVTNAQDFGAQGVLIYPEPADFSQDPPKPSLSSQQAVYGHVHLGTGDPYTPGFPSFNQTQFPPVASSGLPSIPAQPISADIASRLLRKLKGPVAPQEWQGSLLGSPYHLGPGPRLRLVVNNHRTSTPINNIFGCIEGRSEPDHYVVIGAQRDAWGPGAAKSAVGTAILLELVRTFSSMVSNGFRPRRSLLFISWDGGDFGSVGSTEWLEGYLSVLHLKAVVYVSLDNAVLGDDKFHAKTSPLLTSLIESVLKQVDSPNHSGQTLYEQVVFTNPSWDAEVIRPLPMDSSAYSFTAFVGVPAVEFSFMEDDQAYPFLHTKEDTYENLHKVLQGRLPAVAQAVAQLAGQLLIRLSHDRLLPLDFGRYGDVVLRHIGNLNEFSGDLKARGLTLQWVYSARGDYIRAAEKLRQEIYSSEERDERLTRMYNVRIMRVEFYFLSQYVSPADSPFRHIFMGRGDHTLGALLDHLRLLRSNSSGTPGATSSTGFQESRFRRQLALLTWTLQGAANALSGDVWNIDNNFHHHHHH

SEQ ID NO: 2 - protein, 656 aa, Macaca fascicularis
DYKDDDDKAPRLYWDDLKRKLSEKLDTTDFTSTIKLLNENLYVPREAGSQKDENLALYIENQFREFKLSKVWRDQHFVKIQVKDSAQNSVIIVDKNGGLVYLVENPGGYVAYSKAATVTGKLVHANFGTKKDFEDLDSPVNGSIVIVRAGKITFAEKVANAESLNAIGVLIYMDQTKFPIVKADLSFFGHAHLGTGDPYTPGFPSFNHTQFPPSQSSGLPNIPVQTISRAAAEKLFGNMEGDCPSDWKTDSTCKMVTSENKSVKLTVSNVLKETKILNIFGVIKGFVEPDHYVVVGAQRDAWGPGAAKSSVGTALLLKLAQMFSDMVLKDGFQPSRSIIFASWSAGDFGSVGATEWLEGYLSSLHLKAFTYINLDKAVLGTSNFKVSASPLLYTLIEKTMQDVKHPVTGRSLYQDSNWASKVEKLTLDNAAFPFLAYSGIPAVSFCFCEDTDYPYLGTTMDTYKELVERIPELNKVARAAAEVAGQFVIKLTHDTELNLDYERYNSQLLLFLRDLNQYRADVKEMGLSLQWLYSARGDFFRATSRLTTDFRNAEKRDKFVMKKLNDRVMRVEYYFLSPYVSPKESPFRHVFWGSGSHTLSALLESLKLRRQNNSAFNETLFRNQLALATWTIQGAANALSGDVWDIDNEFHHHHHH

SEQ ID NO: 3 - protein, 656 aa, Callithrix jacchus
DYKDDDDKVPQLYWDDLKKMLSEKLDTTDFTSTIKLLNENSYVPREAGSQKDENLAWYIENQFRECKLSKVWRDEHFVKIQVKDSAQNSVTITGTNSEFVYLVENPGGYVAYSQNATVTGKLVHANFGTEKDFEDLDSPVNGSLVIVRAGKITFAEKVANAESANAIGVLIYMDKTKFPIVDADVSFFGHAHLGTGDPYTPGFPSFNHTQFPPSRSSGLPNIPVQTISRAAAERLFENMEGDCPSDWKTDSSCRMVTSQNKSVKLSVSNVMKEIKILNIFGVIKGFVEPDRYVVVGAQRDSWGPGAAKSSVGTALLLELAQTFSDMVLKDGFQPSRSIVFASWSAGDFGSVGATEWLEGYLSSLHLKAFTFINLDKAVLGTSNFRVSASPLLYALIEKTMQEVKHPVTGLSLYQDSNWASKVEKLTFDNAAFPFLAYSGIPAVSFCFCEDTDYPYLGTTMDTYKELIEKIPQLNKVARAAAEVAGQFMIKLTHDVELNLDYERYNSQLLSFLRNLNQYRADIREMGLSLQWLYSARGDFFRATSRLTTDFKNSEKTDRFVMKELNDRVMKVEYYFLSPYVSPRESPFRHIFWGSGSHTLSALLEHLKLRKTNNRAFNETLFRNQLALATWTIQGAANALSGDIWDIDNEFHHHHHH

SEQ ID NO: 4 - protein, 655 aa, Rattus rattus
DYKDDDDKSSRLFWADLKTLLSEKLNSIEFTDIIKQLSQNTYTPREAGSQKDENLAYYIENLFHDFKFSKVWRDEHYVKIQVKNSVSQNLVTINSGSNIDPVEAPEGYVAFSKAGEVTGKLVHANFGTKKDFEELNYSVNGSLVIVRAGKITFAEKVANAQSFNAIGVLIYMDRNTFPVVEADLQFFGHAHLGTGDPYTPGFPSFNHTQFPPSQSSGLPSIPVQTISRAAAEKLFKNMEGNCPPSWNIDSSCKLELSQNQNVKLTVNNVLKETRILNIFGVIKGYEEPDRYIVVGAQRDAWGPGVAKSSVGTGLLLKLAQVFSDMISKDGFRPSRSIIFASWTAGDYGAVGATEWLEGYLSSLHLKAFTYINLDKVVLGTSNFKVSASPLLYTLMGKIMQDVKHPIDGKYLYRDSNWISKIEELSLDNAAFPFLAYSGIPAVSFCFCEDEDYPYLGTKLDTYEILIQKVPQLNQMVRTAAEVAGQFIIKLTHDIELTLDYEMYNSKLLSFMKDLNQFKADIKDMGLSLQWLYSARGDYFRATSRLTTDFHNAEKTNRFVMREINDRIMKVEYHFLSPYVSPRESPFRHIFWGSGSHTLSALVENLRLRQKNITAFNETLFRNQLALATWTIQGVANALSGDIWNIDNEFHHHHHH

SEQ ID NO: 5 - protein, 657 aa, Mus musculus
DYKDDDDKSSRLYWADLKTLLSEKLNSIEFADTIKQLSQNTYTPREAGSQKDESLAYYIENQFHEFKFSKVWRDEHYVKIQVKSSIGQNMVTIVQSNGNLDPVESPEGYVAFSKPTEVSGKLVHANFGTKKDFEELSYSVNGSLVIVRAGEITFAEKVANAQSFNAIGVLIYMDKNKFPVVEADLALFGHAHLGTGDPYTPGFPSFNHTQFPPSQSSGLPNIPVQTISRAAAEKLFGKMEGSCPARWNIDSSCKLELSQNQNVKLIVKNVLKERRILNIFGVIKGYEEPDRYVVVGAQRDALGAGVAAKSSVGTGLLLKLAQVFSDMISKDGFRPSRSIIFASWTAGDFGAVGATEWLEGYLSSLHLKAFTYINLDKVVLGTSNFKVSASPLLYTLMGKIMQDVKHPVDGKSLYRDSNWISKVEKLSFDNAAYPFLAYSGIPAVSFCFCEDADYPYLGTRLDTYEALTQKVPQLNQMVRTAAEVAGQLIIKLTHDVELNLDYEMYNSKLLSFMKDLNQFKTDIRDMGLSLQWLYSARGDYFRATSRLTTDFHNAEKTNRFVMREINDRIMKVEYHFLSPYVSPRESPFRHIFWGSGSHTLSALVENLKLRQKNITAFNETLFRNQLALATWTIQGVANALSGDIWNIDNEFHHHHHH

SEQ ID NO: 6 - protein, 129 aa, Artificial Sequence
  TfR1 (VHH)
QVQLVESGGGLVQTGGSLRLSCAASGLTFSNYAMGWFRQAPGKKREFVAHIGGSGGTWRYADSVKGRFTISRDNAKNMVYLQMNSLNTEDTAIYYCAADQRAGSYSSGWYTRSSDSLYWGQGTQVTVSS

SEQ ID NO: 7 - protein, 8 aa, Artificial Sequence
  TfR1 HCDR1
GLTFSNYA

SEQ ID NO: 8 - protein, 8 aa, Artificial Sequence
  TfR1 HCDR2
IGGSGGTW

SEQ ID NO: 9 - protein, 22 aa, Artificial Sequence
  TfR1 HCDR3
AADQRAGSYSSGWYTRSSDSLY

SEQ ID NO: 10 - protein, 584 aa, Artificial Sequence
  BBBB434 HC1
QITLKESGPTLVKPTQTLTLTCTFSGFSLSTSGMGVSWIRQPPGKALEWLAHIYWDDDKRYNPSLKSRLTITKDTSKNQVVLTMTNMDPVDTATYYCARLYGFTYGFAYWGQGTLVTVSSASTKGPSVFPLAPSSKSTSGGTAALGCLVKDYFPEPVTVSWNSGALTSGVHTFPAVLQSSGLYSLSSVVTVPSSSLGTQTYICNVNHKPSNTKVDKRVEPKSCDKTHTCPPCPAPEAAGGPSVFLFPPKPKDTLMISRTPEVTCVVVSVSHEDPEVKFNWYVDGVEVHNAKTKPREEQYNSTYRVVSVLTVLHQDWLNGKEYKCKVSNKALPAPIEKTISKAKGQPREPQVYVLPPSREEMTKNQVSLLCLVKGFYPSDIAVEWESNGQPENNYLTWPPVLDSDGSFFLYSKLTVDKSRWQQGNVFSCSVMHEALHNHYTQKSLSLSPGGGSGGSQVQLVESGGGLVQTGGSLRLSCAASGLTFSNYAMGWFRQAPGKKREFVAHIGGSGGTWRYADSVKGRFTISRDNAKNMVYLQMNSLNTEDTAIYYCAADQRAGSYSSGWYTRSSDSLYWGQGTQVTVSS

SEQ ID NO: 11 - protein, 218 aa, Artificial Sequence
  BBBB434 LC
DIVMTQSPDSLAVSLGERATINCRASQSVDYNGISYMHWYQQKPGQPPKLLIYAASNPESGVPDRFSGSGSGTDFTLTISSLQAEDVAVYYCQQIIEDPWTFGQGTKVEIKRTVAAPSVFIFPPSDEQLKSGTASVVCLLNNFYPREAKVQWKVDNALQSGNSQESVTEQDSKDSTYSLSSTLTLSKADYEKHKVYACEVTHQGLSSPVTKSFNRGEC

SEQ ID NO: 12 - protein, 449 aa, Artificial Sequence
  BBBB434 HC2
QITLKESGPTLVKPTQTLTLTCTFSGFSLSTSGMGVSWIRQPPGKALEWLAHIYWDDDKRYNPSLKSRLTITKDTSKNQVVLTMTNMDPVDTATYYCARLYGFTYGFAYWGQGTLVTVSSASTKGPSVFPLAPSSKSTSGGTAALGCLVKDYFPEPVTVSWNSGALTSGVHTFPAVLQSSGLYSLSSVVTVPSSSLGTQTYICNVNHKPSNTKVDKRVEPKSCDKTHTCPPCPAPEAAGGPSVFLFPPKPKDTLMISRTPEVTCVVVSVSHEDPEVKFNWYVDGVEVHNAKTKPREEQYNSTYRVVSVLTVLHQDWLNGKEYKCKVSNKALPAPIEKTISKAKGQPREPQVYVYPPSREEMTKNQVSLTCLVKGFYPSDIAVEWESNGQPENNYKTTPPVLDSDGSFALVSKLTVDKSRWQQGNVFSCSVMHEALHNHYTQKSLSLSPG

SEQ ID NO: 13 - protein, 584 aa, Artificial Sequence
  BBBB978 HC1
QVQLVQSGAEVKKPGSSVKVSCKASGGTLSHYGVSWVRQAPGQGLEWMGNIIPGIGTANYAQKFQGRVTITADESTSTAYMELSSLRSEDTAVYYCARSGGTKYGMLDVWGQGTMVTVSSASTKGPSVFPLAPSSKSTSGGTAALGCLVKDYFPEPVTVSWNSGALTSGVHTFPAVLQSSGLYSLSSVVTVPSSSLGTQTYICNVNHKPSNTKVDKRVEPKSCDKTHTCPPCPAPEAAGGPSVFLFPPKPKDTLMISRTPEVTCVVVSVSHEDPEVKFNWYVDGVEVHNAKTKPREEQYNSTYRVVSVLTVLHQDWLNGKEYKCKVSNKALPAPIEKTISKAKGQPREPQVYVLPPSREEMTKNQVSLLCLVKGFYPSDIAVEWESNGQPENNYLTWPPVLDSDGSFFLYSKLTVDKSRWQQGNVFSCSVMHEALHNHYTQKSLSLSPGGGSGGSQVQLVESGGGLVQTGGSLRLSCAASGLTFSNYAMGWFRQAPGKKREFVAHIGGSGGTWRYADSVKGRFTISRDNAKNMVYLQMNSLNTEDTAIYYCAADQRAGSYSSGWYTRSSDSLYWGQGTQVTVSS

SEQ ID NO: 14 - protein, 215 aa, Artificial Sequence
  BBBB978 LC
EIVMTQSPATLSVSPGERATLSCRASQSVSSNLAWYQQKPGQAPRLLIYGASTRATGIPARFSGSGSGTEFTLTISSLQSEDFAVYYCQQLILWPPRTFGGGTKVEIKRTVAAPSVFIFPPSDEQLKSGTASVVCLLNNFYPREAKVQWKVDNALQSGNSQESVTEQDSKDSTYSLSSTLTLSKADYEKHKVYACEVTHQGLSSPVTKSFNRGEC

SEQ ID NO: 15 - protein, 449 aa, Artificial Sequence
  BBBB978 HC2
QVQLVQSGAEVKKPGSSVKVSCKASGGTLSHYGVSWVRQAPGQGLEWMGNIIPGIGTANYAQKFQGRVTITADESTSTAYMELSSLRSEDTAVYYCARSGGTKYGMLDVWGQGTMVTVSSASTKGPSVFPLAPSSKSTSGGTAALGCLVKDYFPEPVTVSWNSGALTSGVHTFPAVLQSSGLYSLSSVVTVPSSSLGTQTYICNVNHKPSNTKVDKRVEPKSCDKTHTCPPCPAPEAAGGPSVFLFPPKPKDTLMISRTPEVTCVVVSVSHEDPEVKFNWYVDGVEVHNAKTKPREEQYNSTYRVVSVLTVLHQDWLNGKEYKCKVSNKALPAPIEKTISKAKGQPREPQVYVYPPSREEMTKNQVSLTCLVKGFYPSDIAVEWESNGQPENNYKTTPPVLDSDGSFALVSKLTVDKSRWQQGNVFSCSVMHEALHNHYTQKSLSLSPG

SEQ ID NO: 16 - protein, 582 aa, Artificial Sequence
  BBBB1009 HC1
EVQLVESGGGLVKPGGSLRLSCAASGFTFSSYAMSWVRQAPGKGLEWVASISKGGNTYYPDSVKGRFTISRDNAKNSLYLQMNSLRAEDTAVYYCARGWGDYGWFAYWGQVTLVTVSSASTKGPSVFPLAPSSKSTSGGTAALGCLVKDYFPEPVTVSWNSGALTSGVHTFPAVLQSSGLYSLSSVVTVPSSSLGTQTYICNVNHKPSNTKVDKKVEPKSCDKTHTCPPCPAPELLGGPSVFLFPPKPKDTLMISRTPEVTCVVVDVSHEDPEVKFNWYVDGVEVHNAKTKPREEQYNSTYRVVSVLTVLHQDWLNGKEYKCKVSNKALPAPIEKTISKAKGQPREPQVYVYPPSREEMTKNQVSLTCLVKGFYPSDIAVEWESNGQPENNYKTTPPVLDSDGSFALVSKLTVDKSRWQQGNVFSCSVMHEALHNHYTQKSLSLSPGGGAGGAQVQLVESGGGLVQTGGSLRLSCAASGLTFSNYAMGWFRQAPGKKREFVAHIGGSGGTWRYADSVKGRFTISRDNAKNMVYLQMNSLNTEDTAIYYCAADQRAGSYSSGWYTRSSDSLYWGQGTQVTVSS

SEQ ID NO: 17 - protein, 214 aa, Artificial Sequence
  BBBB1009 LC
DIQMTQSPSSLSASVGDRVTITCKASQDINRYLNWFQQKPGKAPKTLIYRANRLLDGVPSRFSGSGSGTDFTLTISSLQPEDFATYYCQQYDEFPLTFGQGTKLEIKRTVAAPSVFIFPPSDEQLKSGTASVVCLLNNFYPREAKVQWKVDNALQSGNSQESVTEQDSKDSTYSLSSTLTLSKADYEKHKVYACEVTHQGLSSPVTKSFNRGEC

SEQ ID NO: 18 - protein, 447 aa, Artificial Sequence
  BBBB1009 HC2
EVQLVESGGGLVKPGGSLRLSCAASGFTFSSYAMSWVRQAPGKGLEWVASISKGGNTYYPDSVKGRFTISRDNAKNSLYLQMNSLRAEDTAVYYCARGWGDYGWFAYWGQVTLVTVSSASTKGPSVFPLAPSSKSTSGGTAALGCLVKDYFPEPVTVSWNSGALTSGVHTFPAVLQSSGLYSLSSVVTVPSSSLGTQTYICNVNHKPSNTKVDKKVEPKSCDKTHTCPPCPAPELLGGPSVFLFPPKPKDTLMISRTPEVTCVVVDVSHEDPEVKFNWYVDGVEVHNAKTKPREEQYNSTYRVVSVLTVLHQDWLNGKEYKCKVSNKALPAPIEKTISKAKGQPREPQVYVLPPSREEMTKNQVSLLCLVKGFYPSDIAVEWESNGQPENNYLTWPPVLDSDGSFFLYSKLTVDKSRWQQGNVFSCSVMHEALHNHYTQKSLSLSPG

SEQ ID NO: 19 - protein, 582 aa, Artificial Sequence
  BBBB1011 HC1
EVQLVESGGGLVKPGGSLRLSCAASGFTFSSYAMSWVRQAPGKGLEWVASISKGGNTYYPDSVKGRFTISRDNAKNSLYLQMNSLRAEDTAVYYCARGWGDYGWFAYWGQVTLVTVSSASTKGPSVFPLAPSSKSTSGGTAALGCLVKDYFPEPVTVSWNSGALTSGVHTFPAVLQSSGLYSLSSVVTVPSSSLGTQTYICNVNHKPSNTKVDKKVEPKSCDKTHTCPPCPAPEAAGGPSVFLFPPKPKDTLYITREPEVTCVVVSVSHEDPEVKFNWYVDGVEVHNAKTKPREEQYNSTYRVVSVLTVLHQDWLNGKEYKCKVSNKALPAPIEKTISKAKGQPREPQVYVYPPSREEMTKNQVSLTCLVKGFYPSDIAVEWESNGQPENNYKTTPPVLDSDGSFALVSKLTVDKSRWQQGNVFSCSVMHEALHNHYTQKSLSLSPGGGAGGAQVQLVESGGGLVQTGGSLRLSCAASGLTFSNYAMGWFRQAPGKKREFVAHIGGSGGTWRYADSVKGRFTISRDNAKNMVYLQMNSLNTEDTAIYYCAADQRAGSYSSGWYTRSSDSLYWGQGTQVTVSS

SEQ ID NO: 20 - protein, 214 aa, Artificial Sequence; identical to SEQ ID NO: 17
  BBBB1011 LC

SEQ ID NO: 21 - protein, 420 aa, Artificial Sequence
  BBBB1011 HC2
EVQLVESGGGLVKPGGSLRLSCAASGFTFSSYAMSWVRQAPGKGLEWVASISKGGNTYYPDSVKGRFTISRDNAKNSLYLQMNSLRAEDTAVYYCARGWGDYGWFAYWGQVTLVTVSSASTKGPSVFPLAPSSKSTSGGTAALGCLVKDYFPEPVTVSWNSGALTSGVHTFPAVLQSSGLYSLSSVVTVPSSSLGTQTYICNVNHKPSNTKVDKKVEPKSCDKTHTCPPCPAPEAAGGPSVFLFPPKPKDTLYITREPEVTCVVVSVSHEDPEVKFNWYVDGVEVHNAKTKPREEQYNSTYRVVSVLTVLHQDWLNGKEYKCKVSNKALPAPIEKTISKAKGQPREPQVYVLPPSREEMTKNQVSLLCLVKGFYPSDIAVEWESNGQPENNYLTWPPVLDSDGSFFLYSKLTVDKSRWQQ

SEQ ID NO: 22 - protein, 580 aa, Artificial Sequence
  BBBB1073 HC1
QVQLVQSGAEVKKPGASVKVSCKASGHVFTSYDMYWVRQAPGQGLEWIGYIDSDSGDTSYNQKFKGRVTLTVDTSTSTVYMELSSLRSEDTAVYYCAYYRYAMDYWGQGTLVTVSSASTKGPSVFPLAPSSKSTSGGTAALGCLVKDYFPEPVTVSWNSGALTSGVHTFPAVLQSSGLYSLSSVVTVPSSSLGTQTYICNVNHKPSNTKVDKKVEPKSCDKTHTCPPCPAPEAAGGPSVFLFPPKPKDTLYITREPEVTCVVVSVSHEDPEVKFNWYVDGVEVHNAKTKPREEQYNSTYRVVSVLTVLHQDWLNGKEYKCKVSNKALPAPIEKTISKAKGQPREPQVYVYPPSREEMTKNQVSLTCLVKGFYPSDIAVEWESNGQPENNYKTTPPVLDSDGSFALVSKLTVDKSRWQQGNVFSCSVMHEALHNHYTQKSLSLSPGGGAGGAQVQLVESGGGLVQTGGSLRLSCAASGLTFSNYAMGWFRQAPGKKREFVAHIGGSGGTWRYADSVKGRFTISRDNAKNMVYLQMNSLNTEDTAIYYCAADQRAGSYSSGWYTRSSDSLYWGQGTQVTVSS

SEQ ID NO: 23 - protein, 219 aa, Artificial Sequence
  BBBB1073 LC
DVVMTQSPLSLPVTLGQPASISCKSSQSLLDSRAKTYLTWLQQRPGQSPRRLIYLVSKLDSGVPDRFSGSGSGTDFTLKISRVEAEDVGVYYCWQGTHFPYTFGGGTKLEIKRTVAAPSVFIFPPSDEQLKSGTASVVCLLNNFYPREAKVQWKVDNALQSGNSQESVTEQDSKDSTYSLSSTLTLSKADYEKHKVYACEVTHQGLSSPVTKSFNRGEC

SEQ ID NO: 24 - protein, 445 aa, Artificial Sequence
  BBBB1073 HC2
QVQLVQSGAEVKKPGASVKVSCKASGHVFTSYDMYWVRQAPGQGLEWIGYIDSDSGDTSYNQKFKGRVTLTVDTSTSTVYMELSSLRSEDTAVYYCAYYRYAMDYWGQGTLVTVSSASTKGPSVFPLAPSSKSTSGGTAALGCLVKDYFPEPVTVSWNSGALTSGVHTFPAVLQSSGLYSLSSVVTVPSSSLGTQTYICNVNHKPSNTKVDKKVEPKSCDKTHTCPPCPAPEAAGGPSVFLFPPKPKDTLYITREPEVTCVVVSVSHEDPEVKFNWYVDGVEVHNAKTKPREEQYNSTYRVVSVLTVLHQDWLNGKEYKCKVSNKALPAPIEKTISKAKGQPREPQVYVLPPSREEMTKNQVSLLCLVKGFYPSDIAVEWESNGQPENNYLTWPPVLDSDGSFFLYSKLTVDKSRWQQGNVFSCSVMHEALHNHYTQKSLSLSPG

SEQ ID NO: 25 - protein, 581 aa, Artificial Sequence
  BBBB1215 HC1
QITLKESGPTLVKPTQTLTLTCTFSGFSLSTSGMGVSWIRQPPGKALEWLAHIYWDDDKRYNPSLKSRLTITKDTSKNQVVLTMTNMDPVDTATYYCARLYGFTYGFAYWGQGTLVTVSSASTKGPSVFPLAPCSRSTSESTAALGCLVKDYFPEPVTVSWNSGALTSGVHTFPAVLQSSGLYSLSSVVTVPSSSLGTKTYTCNVDHKPSNTKVDKRVESKYGPPCPPCPAPEAAGGPSVFLFPPKPKDTLMISRTPEVTCVVVDVSQEDPEVQFNWYVDGVEVHNAKTKPREEQFNSTYRVVSVLTVLHQDWLNGKEYKCKVSNKGLPSSIEKTISKAKGQPREPQVYVLPPSQEEMTKNQVSLLCLVKGFYPSDIAVEWESNGQPENNYLTWPPVLDSDGSFFLYSRLTVDKSRWQEGNVFSCSVMHEALHNHYTQKSLSLSLGGGSGGSQVQLVESGGGLVQTGGSLRLSCAASGLTFSNYAMGWFRQAPGKKREFVAHIGGSGGTWRYADSVKGRFTISRDNAKNMVYLQMNSLNTEDTAIYYCAADQRAGSYSSGWYTRSSDSLYWGQGTQVTVSS

SEQ ID NO: 26 - protein, 218 aa, Artificial Sequence; identical to SEQ ID NO: 11
  BBBB1215 LC

SEQ ID NO: 27 - protein, 446 aa, Artificial Sequence
  BBBB1215 HC2
QITLKESGPTLVKPTQTLTLTCTFSGFSLSTSGMGVSWIRQPPGKALEWLAHIYWDDDKRYNPSLKSRLTITKDTSKNQVVLTMTNMDPVDTATYYCARLYGFTYGFAYWGQGTLVTVSSASTKGPSVFPLAPCSRSTSESTAALGCLVKDYFPEPVTVSWNSGALTSGVHTFPAVLQSSGLYSLSSVVTVPSSSLGTKTYTCNVDHKPSNTKVDKRVESKYGPPCPPCPAPEAAGGPSVFLFPPKPKDTLMISRTPEVTCVVVDVSQEDPEVQFNWYVDGVEVHNAKTKPREEQFNSTYRVVSVLTVLHQDWLNGKEYKCKVSNKGLPSSIEKTISKAKGQPREPQVYVYPPSQEEMTKNQVSLTCLVKGFYPSDIAVEWESNGQPENNYKTTPPVLDSDGSFALVSRLTVDKSRWQEGNVFSCSVMHEALHNHYTQKSLSLSLG

SEQ ID NO: 28 - protein, 248 aa, Artificial Sequence
  TfR2 (ScFV)
EVQLVESGGGLVKPGGSLRLSCAASGFTFRNAWMSWVRQAPGKGLEWVGRIKRKIDGGTTDYAAPVKGRFTISRDDSKNTLYLQMNSLKTEDTAVYYCTTDPSRIPVAGAFDYWGQGILVTVSSGTEGKSSGSGSESKSTEIVLTQSPGTLSLSPGERATLSCRASQSVSSTYLAWYQQKPGQAPRLLIYGASSRATGIPDRFSGSGSGTDFTLTISSLEPEDFAVYYCQQYGSSPYTFGQGTKLEIK

SEQ ID NO: 29 - protein, 8 aa, Artificial Sequence
  TfR2 HCDR1
GFTFRNAW

SEQ ID NO: 30 - protein, 9 aa, Artificial Sequence
  TfR2 HCDR2
IKRKIDGGT

SEQ ID NO: 31 - protein, 15 aa, Artificial Sequence
  TfR2 HCDR3
TTDPSRIPVAGAFDY

SEQ ID NO: 32 - protein, 7 aa, Artificial Sequence
  TfR2 LCDR1
QSVSSTY

SEQ ID NO: 33 - protein, 7 aa, Artificial Sequence
  TfR2 LCDR2
GASSRAT

SEQ ID NO: 34 - protein, 9 aa, Artificial Sequence
  TfR2 LCDR3
QQYGSSPYT

SEQ ID NO: 35 - protein, 703 aa, Artificial Sequence
  BBBB501 HC1
QITLKESGPTLVKPTQTLTLTCTFSGFSLSTSGMGVSWIRQPPGKALEWLAHIYWDDDKRYNPSLKSRLTITKDTSKNQVVLTMTNMDPVDTATYYCARLYGFTYGFAYWGQGTLVTVSSASTKGPSVFPLAPSSKSTSGGTAALGCLVKDYFPEPVTVSWNSGALTSGVHTFPAVLQSSGLYSLSSVVTVPSSSLGTQTYICNVNHKPSNTKVDKRVEPKSCDKTHTCPPCPAPEAAGGPSVFLFPPKPKDTLMISRTPEVTCVVVSVSHEDPEVKFNWYVDGVEVHNAKTKPREEQYNSTYRVVSVLTVLHQDWLNGKEYKCKVSNKALPAPIEKTISKAKGQPREPQVYVLPPSREEMTKNQVSLLCLVKGFYPSDIAVEWESNGQPENNYLTWPPVLDSDGSFFLYSKLTVDKSRWQQGNVFSCSVMHEALHNHYTQKSLSLSPGGGSGGSEVQLVESGGGLVKPGGSLRLSCAASGFTFRNAWMSWVRQAPGKGLEWVGRIKRKIDGGTTDYAAPVKGRFTISRDDSKNTLYLQMNSLKTEDTAVYYCTTDPSRIPVAGAFDYWGQGILVTVSSGTEGKSSGSGSESKSTEIVLTQSPGTLSLSPGERATLSCRASQSVSSTYLAWYQQKPGQAPRLLIYGASSRATGIPDRFSGSGSGTDFTLTISSLEPEDFAVYYCQQYGSSPYTFGQGTKLEIK

SEQ ID NO: 36 - protein, 218 aa, Artificial Sequence; identical to SEQ ID NO: 11
  BBBB501 LC

SEQ ID NO: 37 - protein, 449 aa, Artificial Sequence; identical to SEQ ID NO: 12
  BBBB501 HC2

SEQ ID NO: 38 - protein, 703 aa, Artificial Sequence
  BBBB951 HC1
QITLKESGPTLVKPTQTLTLTCTFSGFSLSTSGMGVSWIRQPPGKALEWLAHIYWDDDKRYNPSLKSRLTITKDTSKNQVVLTMTNMDPVDTATYYCARLYGFTYGFAYWGQGTLVTVSSASTKGPSVFPLAPSSKSTSGGTAALGCLVKDYFPEPVTVSWNSGALTSGVHTFPAVLQSSGLYSLSSVVTVPSSSLGTQTYICNVNHKPSNTKVDKKVEPKSCDKTHTCPPCPAPELLGGPSVFLFPPKPKDTLMISRTPEVTCVVVDVSHEDPEVKFNWYVDGVEVHNAKTKPREEQYNSTYRVVSVLTVLHQDWLNGKEYKCKVSNKALPAPIEKTISKAKGQPREPQVYVYPPSRDELTKNQVSLTCLVKGFYPSDIAVEWESNGQPENNYKTTPPVLDSDGSFALVSKLTVDKSRWQQGNVFSCSVMHEALHNHYTQKSLSLSPGGGSGGSEVQLVESGGGLVKPGGSLRLSCAASGFTFRNAWMSWVRQAPGKGLEWVGRIKRKIDGGTTDYAAPVKGRFTISRDDSKNTLYLQMNSLKTEDTAVYYCTTDPSRIPVAGAFDYWGQGILVTVSSGTEGKSSGSGSESKSTEIVLTQSPGTLSLSPGERATLSCRASQSVSSTYLAWYQQKPGQAPRLLIYGASSRATGIPDRFSGSGSGTDFTLTISSLEPEDFAVYYCQQYGSSPYTFGQGTKLEIK

SEQ ID NO: 39 - protein, 218 aa, Artificial Sequence; identical to SEQ ID NO: 11
  BBBB951 LC

SEQ ID NO: 40 - protein, 449 aa, Artificial Sequence; identical to SEQ ID NO: 12
  BBBB951 HC2

SEQ ID NO: 41 - protein, 703 aa, Artificial Sequence
  BBBB979 HC1
QVQLVQSGAEVKKPGSSVKVSCKASGGTLSHYGVSWVRQAPGQGLEWMGNIIPGIGTANYAQKFQGRVTITADESTSTAYMELSSLRSEDTAVYYCARSGGTKYGMLDVWGQGTMVTVSSASTKGPSVFPLAPSSKSTSGGTAALGCLVKDYFPEPVTVSWNSGALTSGVHTFPAVLQSSGLYSLSSVVTVPSSSLGTQTYICNVNHKPSNTKVDKRVEPKSCDKTHTCPPCPAPEAAGGPSVFLFPPKPKDTLMISRTPEVTCVVVSVSHEDPEVKFNWYVDGVEVHNAKTKPREEQYNSTYRVVSVLTVLHQDWLNGKEYKCKVSNKALPAPIEKTISKAKGQPREPQVYVLPPSREEMTKNQVSLLCLVKGFYPSDIAVEWESNGQPENNYLTWPPVLDSDGSFFLYSKLTVDKSRWQQGNVFSCSVMHEALHNHYTQKSLSLSPGGGSGGSEVQLVESGGGLVKPGGSLRLSCAASGFTFRNAWMSWVRQAPGKGLEWVGRIKRKIDGGTTDYAAPVKGRFTISRDDSKNTLYLQMNSLKTEDTAVYYCTTDPSRIPVAGAFDYWGQGILVTVSSGTEGKSSGSGSESKSTEIVLTQSPGTLSLSPGERATLSCRASQSVSSTYLAWYQQKPGQAPRLLIYGASSRATGIPDRFSGSGSGTDFTLTISSLEPEDFAVYYCQQYGSSPYTFGQGTKLEIK

SEQ ID NO: 42 - protein, 215 aa, Artificial Sequence; identical to SEQ ID NO: 14
  BBBB979 LC

SEQ ID NO: 43 - protein, 449 aa, Artificial Sequence; identical to SEQ ID NO: 15
  BBBB979 HC2

SEQ ID NO: 44 - protein, 701 aa, Artificial Sequence
  BBBB1020 HC1
EVQLVESGGGLVKPGGSLRLSCAASGFTFSSYAMSWVRQAPGKGLEWVASISKGGNTYYPDSVKGRFTISRDNAKNSLYLQMNSLRAEDTAVYYCARGWGDYGWFAYWGQVTLVTVSSASTKGPSVFPLAPSSKSTSGGTAALGCLVKDYFPEPVTVSWNSGALTSGVHTFPAVLQSSGLYSLSSVVTVPSSSLGTQTYICNVNHKPSNTKVDKKVEPKSCDKTHTCPPCPAPEAAGGPSVFLFPPKPKDTLYITREPEVTCVVVSVSHEDPEVKFNWYVDGVEVHNAKTKPREEQYNSTYRVVSVLTVLHQDWLNGKEYKCKVSNKALPAPIEKTISKAKGQPREPQVYVYPPSREEMTKNQVSLTCLVKGFYPSDIAVEWESNGQPENNYKTTPPVLDSDGSFALVSKLTVDKSRWQQGNVFSCSVMHEALHNHYTQKSLSLSPGGGAGGAEVQLVESGGGLVKPGGSLRLSCAASGFTFRNAWMSWVRQAPGKGLEWVGRIKRKIDGGTTDYAAPVKGRFTISRDDSKNTLYLQMNSLKTEDTAVYYCTTDPSRIPVAGAFDYWGQGILVTVSSGTEGKSSGSGSESKSTEIVLTQSPGTLSLSPGERATLSCRASQSVSSTYLAWYQQKPGQAPRLLIYGASSRATGIPDRFSGSGSGTDFTLTISSLEPEDFAVYYCQQYGSSPYTFGQGTKLEIK

SEQ ID NO: 45 - protein, 214 aa, Artificial Sequence; identical to SEQ ID NO: 17
  BBBB1020 LC

SEQ ID NO: 46 - protein, 447 aa, Artificial Sequence
  BBBB1020 HC2
EVQLVESGGGLVKPGGSLRLSCAASGFTFSSYAMSWVRQAPGKGLEWVASISKGGNTYYPDSVKGRFTISRDNAKNSLYLQMNSLRAEDTAVYYCARGWGDYGWFAYWGQVTLVTVSSASTKGPSVFPLAPSSKSTSGGTAALGCLVKDYFPEPVTVSWNSGALTSGVHTFPAVLQSSGLYSLSSVVTVPSSSLGTQTYICNVNHKPSNTKVDKKVEPKSCDKTHTCPPCPAPEAAGGPSVFLFPPKPKDTLYITREPEVTCVVVSVSHEDPEVKFNWYVDGVEVHNAKTKPREEQYNSTYRVVSVLTVLHQDWLNGKEYKCKVSNKALPAPIEKTISKAKGQPREPQVYVLPPSREEMTKNQVSLLCLVKGFYPSDIAVEWESNGQPENNYLTWPPVLDSDGSFFLYSKLTVDKSRWQQGNVFSCSVMHEALHNHYTQKSLSLSPG

SEQ ID NO: 47 - protein, 701 aa, Artificial Sequence
  BBBB1018 HC1
EVQLVESGGGLVKPGGSLRLSCAASGFTFSSYAMSWVRQAPGKGLEWVASISKGGNTYYPDSVKGRFTISRDNAKNSLYLQMNSLRAEDTAVYYCARGWGDYGWFAYWGQVTLVTVSSASTKGPSVFPLAPSSKSTSGGTAALGCLVKDYFPEPVTVSWNSGALTSGVHTFPAVLQSSGLYSLSSVVTVPSSSLGTQTYICNVNHKPSNTKVDKKVEPKSCDKTHTCPPCPAPELLGGPSVFLFPPKPKDTLMISRTPEVTCVVVDVSHEDPEVKFNWYVDGVEVHNAKTKPREEQYNSTYRVVSVLTVLHQDWLNGKEYKCKVSNKALPAPIEKTISKAKGQPREPQVYVYPPSREEMTKNQVSLTCLVKGFYPSDIAVEWESNGQPENNYKTTPPVLDSDGSFALVSKLTVDKSRWQQGNVFSCSVMHEALHNHYTQKSLSLSPGGGAGGAEVQLVESGGGLVKPGGSLRLSCAASGFTFRNAWMSWVRQAPGKGLEWVGRIKRKIDGGTTDYAAPVKGRFTISRDDSKNTLYLQMNSLKTEDTAVYYCTTDPSRIPVAGAFDYWGQGILVTVSSGTEGKSSGSGSESKSTEIVLTQSPGTLSLSPGERATLSCRASQSVSSTYLAWYQQKPGQAPRLLIYGASSRATGIPDRFSGSGSGTDFTLTISSLEPEDFAVYYCQQYGSSPYTFGQGTKLEIK

SEQ ID NO: 48 - protein, 214 aa, Artificial Sequence; identical to SEQ ID NO: 17
  BBBB1018 LC

SEQ ID NO: 49 - protein, 447 aa, Artificial Sequence; identical to SEQ ID NO: 18
  BBBB1018 HC2

SEQ ID NO: 50 - protein, 699 aa, Artificial Sequence
  BBBB1076 HC1
QVQLVQSGAEVKKPGASVKVSCKASGHVFTSYDMYWVRQAPGQGLEWIGYIDSDSGDTSYNQKFKGRVTLTVDTSTSTVYMELSSLRSEDTAVYYCAYYRYAMDYWGQGTLVTVSSASTKGPSVFPLAPSSKSTSGGTAALGCLVKDYFPEPVTVSWNSGALTSGVHTFPAVLQSSGLYSLSSVVTVPSSSLGTQTYICNVNHKPSNTKVDKKVEPKSCDKTHTCPPCPAPEAAGGPSVFLFPPKPKDTLYITREPEVTCVVVSVSHEDPEVKFNWYVDGVEVHNAKTKPREEQYNSTYRVVSVLTVLHQDWLNGKEYKCKVSNKALPAPIEKTISKAKGQPREPQVYVYPPSREEMTKNQVSLTCLVKGFYPSDIAVEWESNGQPENNYKTTPPVLDSDGSFALVSKLTVDKSRWQQGNVFSCSVMHEALHNHYTQKSLSLSPGGGAGGAEVQLVESGGGLVKPGGSLRLSCAASGFTFRNAWMSWVRQAPGKGLEWVGRIKRKIDGGTTDYAAPVKGRFTISRDDSKNTLYLQMNSLKTEDTAVYYCTTDPSRIPVAGAFDYWGQGILVTVSSGTEGKSSGSGSESKSTEIVLTQSPGTLSLSPGERATLSCRASQSVSSTYLAWYQQKPGQAPRLLIYGASSRATGIPDRFSGSGSGTDFTLTISSLEPEDFAVYYCQQYGSSPYTFGQGTKLEIK

SEQ ID NO: 51 - protein, 219 aa, Artificial Sequence; identical to SEQ ID NO: 23
  BBBB1076 LC

SEQ ID NO: 52 - protein, 445 aa, Artificial Sequence; identical to SEQ ID NO: 24
  BBBB1076 HC2

SEQ ID NO: 53 - protein, 700 aa, Artificial Sequence
  BBBB1216 HC1
QITLKESGPTLVKPTQTLTLTCTFSGFSLSTSGMGVSWIRQPPGKALEWLAHIYWDDDKRYNPSLKSRLTITKDTSKNQVVLTMTNMDPVDTATYYCARLYGFTYGFAYWGQGTLVTVSSASTKGPSVFPLAPCSRSTSESTAALGCLVKDYFPEPVTVSWNSGALTSGVHTFPAVLQSSGLYSLSSVVTVPSSSLGTKTYTCNVDHKPSNTKVDKRVESKYGPPCPPCPAPEAAGGPSVFLFPPKPKDTLMISRTPEVTCVVVDVSQEDPEVQFNWYVDGVEVHNAKTKPREEQFNSTYRVVSVLTVLHQDWLNGKEYKCKVSNKGLPSSIEKTISKAKGQPREPQVYVLPPSQEEMTKNQVSLLCLVKGFYPSDIAVEWESNGQPENNYLTWPPVLDSDGSFFLYSRLTVDKSRWQEGNVFSCSVMHEALHNHYTQKSLSLSLGGGSGGSEVQLVESGGGLVKPGGSLRLSCAASGFTFRNAWMSWVRQAPGKGLEWVGRIKRKIDGGTTDYAAPVKGRFTISRDDSKNTLYLQMNSLKTEDTAVYYCTTDPSRIPVAGAFDYWGQGILVTVSSGTEGKSSGSGSESKSTEIVLTQSPGTLSLSPGERATLSCRASQSVSSTYLAWYQQKPGQAPRLLIYGASSRATGIPDRFSGSGSGTDFTLTISSLEPEDFAVYYCQQYGSSPYTFGQGTKLEIK

SEQ ID NO: 54 - protein, 218 aa, Artificial Sequence; identical to SEQ ID NO: 11
  BBBB1216 LC

SEQ ID NO: 55 - protein, 446 aa, Artificial Sequence; identical to SEQ ID NO: 27
  BBBB1216 HC2

SEQ ID NO: 56 - protein, 246 aa, Artificial Sequence
  TfR3 (scFv)
EVQLVESGGGLVKPGGSLRLSCVASGFTFSSYNMNWVRQAPGKGLEWVSSISSSSSYIYYADSVKGRFTISRDNAKNSLYLQMNSLRAEDTAVYYCAREGISAYDALNVWGQGTMVTVSSGTEGKSSGSGSESKSTQSVLTQPPSVSAAPGQKVTISCSGSSSNIGNNYVSWYQQLPGTAPKLLIYDNNKRPSGIPDRFSGSKSGTSATLGITGLQTGDEADYYCGTWDSSLSAVVFGGGTKLTVL

SEQ ID NO: 57 - protein, 11 aa, Artificial Sequence
  TfR3 HCDR1
GFTFSSYNMNW

SEQ ID NO: 58 - protein, 10 aa, Artificial Sequence
  TfR3 HCDR2
SSISSSSSYI

SEQ ID NO: 59 - protein, 13 aa, Artificial Sequence
  TfR3 HCDR3
AREGISAYDALNV

SEQ ID NO: 60 - protein, 9 aa, Artificial Sequence
  TfR3 LCDR1
SSSNIGNNY

SEQ ID NO: 61 - protein, 7 aa, Artificial Sequence
  TfR3 LCDR2
DNNKRPS

SEQ ID NO: 62 - protein, 11 aa, Artificial Sequence
  TfR3 LCDR3
GTWDSSLSAVV

SEQ ID NO: 63 - protein, 701 aa, Artificial Sequence
  BBBB509 HC1
QITLKESGPTLVKPTQTLTLTCTFSGFSLSTSGMGVSWIRQPPGKALEWLAHIYWDDDKRYNPSLKSRLTITKDTSKNQVVLTMTNMDPVDTATYYCARLYGFTYGFAYWGQGTLVTVSSASTKGPSVFPLAPSSKSTSGGTAALGCLVKDYFPEPVTVSWNSGALTSGVHTFPAVLQSSGLYSLSSVVTVPSSSLGTQTYICNVNHKPSNTKVDKRVEPKSCDKTHTCPPCPAPEAAGGPSVFLFPPKPKDTLMISRTPEVTCVVVSVSHEDPEVKFNWYVDGVEVHNAKTKPREEQYNSTYRVVSVLTVLHQDWLNGKEYKCKVSNKALPAPIEKTISKAKGQPREPQVYVLPPSREEMTKNQVSLLCLVKGFYPSDIAVEWESNGQPENNYLTWPPVLDSDGSFFLYSKLTVDKSRWQQGNVFSCSVMHEALHNHYTQKSLSLSPGGGSGGSEVQLVESGGGLVKPGGSLRLSCVASGFTFSSYNMNWVRQAPGKGLEWVSSISSSSSYIYYADSVKGRFTISRDNAKNSLYLQMNSLRAEDTAVYYCAREGISAYDALNVWGQGTMVTVSSGTEGKSSGSGSESKSTQSVLTQPPSVSAAPGQKVTISCSGSSSNIGNNYVSWYQQLPGTAPKLLIYDNNKRPSGIPDRFSGSKSGTSATLGITGLQTGDEADYYCGTWDSSLSAVVFGGGTKLTVL

SEQ ID NO: 64 - protein, 218 aa, Artificial Sequence; identical to SEQ ID NO: 11
  BBBB509 LC

SEQ ID NO: 65 - protein, 449 aa, Artificial Sequence; identical to SEQ ID NO: 12
  BBBB509 HC2

SEQ ID NO: 66 - protein, 701 aa, Artificial Sequence
  BBBB946 HC1
QITLKESGPTLVKPTQTLTLTCTFSGFSLSTSGMGVSWIRQPPGKALEWLAHIYWDDDKRYNPSLKSRLTITKDTSKNQVVLTMTNMDPVDTATYYCARLYGFTYGFAYWGQGTLVTVSSASTKGPSVFPLAPSSKSTSGGTAALGCLVKDYFPEPVTVSWNSGALTSGVHTFPAVLQSSGLYSLSSVVTVPSSSLGTQTYICNVNHKPSNTKVDKKVEPKSCDKTHTCPPCPAPELLGGPSVFLFPPKPKDTLMISRTPEVTCVVVDVSHEDPEVKFNWYVDGVEVHNAKTKPREEQYNSTYRVVSVLTVLHQDWLNGKEYKCKVSNKALPAPIEKTISKAKGQPREPQVYVYPPSRDELTKNQVSLTCLVKGFYPSDIAVEWESNGQPENNYKTTPPVLDSDGSFALVSKLTVDKSRWQQGNVFSCSVMHEALHNHYTQKSLSLSPGGGSGGSEVQLVESGGGLVKPGGSLRLSCVASGFTFSSYNMNWVRQAPGKGLEWVSSISSSSSYIYYADSVKGRFTISRDNAKNSLYLQMNSLRAEDTAVYYCAREGISAYDALNVWGQGTMVTVSSGTEGKSSGSGSESKSTQSVLTQPPSVSAAPGQKVTISCSGSSSNIGNNYVSWYQQLPGTAPKLLIYDNNKRPSGIPDRFSGSKSGTSATLGITGLQTGDEADYYCGTWDSSLSAVVFGGGTKLTVL

SEQ ID NO: 67 - protein, 218 aa, Artificial Sequence; identical to SEQ ID NO: 11
  BBBB946 LC

SEQ ID NO: 68 - protein, 449 aa, Artificial Sequence
  BBBB946 HC2
QITLKESGPTLVKPTQTLTLTCTFSGFSLSTSGMGVSWIRQPPGKALEWLAHIYWDDDKRYNPSLKSRLTITKDTSKNQVVLTMTNMDPVDTATYYCARLYGFTYGFAYWGQGTLVTVSSASTKGPSVFPLAPSSKSTSGGTAALGCLVKDYFPEPVTVSWNSGALTSGVHTFPAVLQSSGLYSLSSVVTVPSSSLGTQTYICNVNHKPSNTKVDKKVEPKSCDKTHTCPPCPAPELLGGPSVFLFPPKPKDTLMISRTPEVTCVVVDVSHEDPEVKFNWYVDGVEVHNAKTKPREEQYNSTYRVVSVLTVLHQDWLNGKEYKCKVSNKALPAPIEKTISKAKGQPREPQVYVLPPSRDELTKNQVSLLCLVKGFYPSDIAVEWESNGQPENNYLTWPPVLDSDGSFFLYSKLTVDKSRWQQGNVFSCSVMHEALHNHYTQKSLSLSPG

SEQ ID NO: 69 - protein, 701 aa, Artificial Sequence
  BBBB974 HC1
QVQLVQSGAEVKKPGSSVKVSCKASGGTLSHYGVSWVRQAPGQGLEWMGNIIPGIGTANYAQKFQGRVTITADESTSTAYMELSSLRSEDTAVYYCARSGGTKYGMLDVWGQGTMVTVSSASTKGPSVFPLAPSSKSTSGGTAALGCLVKDYFPEPVTVSWNSGALTSGVHTFPAVLQSSGLYSLSSVVTVPSSSLGTQTYICNVNHKPSNTKVDKRVEPKSCDKTHTCPPCPAPEAAGGPSVFLFPPKPKDTLMISRTPEVTCVVVSVSHEDPEVKFNWYVDGVEVHNAKTKPREEQYNSTYRVVSVLTVLHQDWLNGKEYKCKVSNKALPAPIEKTISKAKGQPREPQVYVLPPSREEMTKNQVSLLCLVKGFYPSDIAVEWESNGQPENNYLTWPPVLDSDGSFFLYSKLTVDKSRWQQGNVFSCSVMHEALHNHYTQKSLSLSPGGGSGGSEVQLVESGGGLVKPGGSLRLSCVASGFTFSSYNMNWVRQAPGKGLEWVSSISSSSSYIYYADSVKGRFTISRDNAKNSLYLQMNSLRAEDTAVYYCAREGISAYDALNVWGQGTMVTVSSGTEGKSSGSGSESKSTQSVLTQPPSVSAAPGQKVTISCSGSSSNIGNNYVSWYQQLPGTAPKLLIYDNNKRPSGIPDRFSGSKSGTSATLGITGLQTGDEADYYCGTWDSSLSAVVFGGGTKLTVL

SEQ ID NO: 70 - protein, 215 aa, Artificial Sequence; identical to SEQ ID NO: 14
  BBBB974 LC

SEQ ID NO: 71 - protein, 449 aa, Artificial Sequence; identical to SEQ ID NO: 15
  BBBB974 HC2

SEQ ID NO: 72 - protein, 699 aa, Artificial Sequence
  BBBB1023 HC1
EVQLVESGGGLVKPGGSLRLSCAASGFTFSSYAMSWVRQAPGKGLEWVASISKGGNTYYPDSVKGRFTISRDNAKNSLYLQMNSLRAEDTAVYYCARGWGDYGWFAYWGQVTLVTVSSASTKGPSVFPLAPSSKSTSGGTAALGCLVKDYFPEPVTVSWNSGALTSGVHTFPAVLQSSGLYSLSSVVTVPSSSLGTQTYICNVNHKPSNTKVDKKVEPKSCDKTHTCPPCPAPEAAGGPSVFLFPPKPKDTLYITREPEVTCVVVSVSHEDPEVKFNWYVDGVEVHNAKTKPREEQYNSTYRVVSVLTVLHQDWLNGKEYKCKVSNKALPAPIEKTISKAKGQPREPQVYVYPPSREEMTKNQVSLTCLVKGFYPSDIAVEWESNGQPENNYKTTPPVLDSDGSFALVSKLTVDKSRWQQGNVFSCSVMHEALHNHYTQKSLSLSPGGGAGGAEVQLVESGGGLVKPGGSLRLSCVASGFTFSSYNMNWVRQAPGKGLEWVSSISSSSSYIYYADSVKGRFTISRDNAKNSLYLQMNSLRAEDTAVYYCAREGISAYDALNVWGQGTMVTVSSGTEGKSSGSGSESKSTQSVLTQPPSVSAAPGQKVTISCSGSSSNIGNNYVSWYQQLPGTAPKLLIYDNNKRPSGIPDRFSGSKSGTSATLGITGLQTGDEADYYCGTWDSSLSAVVFGGGTKLTVL

SEQ ID NO: 73 - protein, 214 aa, Artificial Sequence; identical to SEQ ID NO: 17
  BBBB1023 LC

SEQ ID NO: 74 - protein, 447 aa, Artificial Sequence; identical to SEQ ID NO: 46
  BBBB1023 HC2

SEQ ID NO: 75 - protein, 699 aa, Artificial Sequence
  BBBB1021 HC1
EVQLVESGGGLVKPGGSLRLSCAASGFTFSSYAMSWVRQAPGKGLEWVASISKGGNTYYPDSVKGRFTISRDNAKNSLYLQMNSLRAEDTAVYYCARGWGDYGWFAYWGQVTLVTVSSASTKGPSVFPLAPSSKSTSGGTAALGCLVKDYFPEPVTVSWNSGALTSGVHTFPAVLQSSGLYSLSSVVTVPSSSLGTQTYICNVNHKPSNTKVDKKVEPKSCDKTHTCPPCPAPELLGGPSVFLFPPKPKDTLMISRTPEVTCVVVDVSHEDPEVKFNWYVDGVEVHNAKTKPREEQYNSTYRVVSVLTVLHQDWLNGKEYKCKVSNKALPAPIEKTISKAKGQPREPQVYVYPPSREEMTKNQVSLTCLVKGFYPSDIAVEWESNGQPENNYKTTPPVLDSDGSFALVSKLTVDKSRWQQGNVFSCSVMHEALHNHYTQKSLSLSPGGGAGGAEVQLVESGGGLVKPGGSLRLSCVASGFTFSSYNMNWVRQAPGKGLEWVSSISSSSSYIYYADSVKGRFTISRDNAKNSLYLQMNSLRAEDTAVYYCAREGISAYDALNVWGQGTMVTVSSGTEGKSSGSGSESKSTQSVLTQPPSVSAAPGQKVTISCSGSSSNIGNNYVSWYQQLPGTAPKLLIYDNNKRPSGIPDRFSGSKSGTSATLGITGLQTGDEADYYCGTWDSSLSAVVFGGGTKLTVL

SEQ ID NO: 76 - protein, 214 aa, Artificial Sequence; identical to SEQ ID NO: 17
  BBBB1021 LC

SEQ ID NO: 77 - protein, 447 aa, Artificial Sequence; identical to SEQ ID NO: 18
  BBBB1021 HC2

SEQ ID NO: 78 - protein, 697 aa, Artificial Sequence
  BBBB1079 HC1
QVQLVQSGAEVKKPGASVKVSCKASGHVFTSYDMYWVRQAPGQGLEWIGYIDSDSGDTSYNQKFKGRVTLTVDTSTSTVYMELSSLRSEDTAVYYCAYYRYAMDYWGQGTLVTVSSASTKGPSVFPLAPSSKSTSGGTAALGCLVKDYFPEPVTVSWNSGALTSGVHTFPAVLQSSGLYSLSSVVTVPSSSLGTQTYICNVNHKPSNTKVDKKVEPKSCDKTHTCPPCPAPEAAGGPSVFLFPPKPKDTLYITREPEVTCVVVSVSHEDPEVKFNWYVDGVEVHNAKTKPREEQYNSTYRVVSVLTVLHQDWLNGKEYKCKVSNKALPAPIEKTISKAKGQPREPQVYVYPPSREEMTKNQVSLTCLVKGFYPSDIAVEWESNGQPENNYKTTPPVLDSDGSFALVSKLTVDKSRWQQGNVFSCSVMHEALHNHYTQKSLSLSPGGGAGGAEVQLVESGGGLVKPGGSLRLSCVASGFTFSSYNMNWVRQAPGKGLEWVSSISSSSSYIYYADSVKGRFTISRDNAKNSLYLQMNSLRAEDTAVYYCAREGISAYDALNVWGQGTMVTVSSGTEGKSSGSGSESKSTQSVLTQPPSVSAAPGQKVTISCSGSSSNIGNNYVSWYQQLPGTAPKLLIYDNNKRPSGIPDRFSGSKSGTSATLGITGLQTGDEADYYCGTWDSSLSAVVFGGGTKLTVL

SEQ ID NO: 79 - protein, 219 aa, Artificial Sequence; identical to SEQ ID NO: 23
  BBBB1079 LC

SEQ ID NO: 80 - protein, 445 aa, Artificial Sequence; identical to SEQ ID NO: 24
  BBBB1079 HC2

SEQ ID NO: 81 - protein, 697 aa, Artificial Sequence
  BBBB1217 HC1
QITLKESGPTLVKPTQTLTLTCTFSGFSLSTSGMGVSWIRQPPGKALEWLAHIYWDDDKRYNPSLKSRLTITKDTSKNQVVLTMTNMDPVDTATYYCARLYGFTYGFAYWGQGTLVTVSSASTKGPSVFPLAPCSRSTSESTAALGCLVKDYFPEPVTVSWNSGALTSGVHTFPAVLQSSGLYSLSSVVTVPSSSLGTKTYTCNVDHKPSNTKVDKRVESKYGPPCPPCPAPEAAGGPSVFLFPPKPKDTLMISRTPEVTCVVVDVSQEDPEVQFNWYVDGVEVHNAKTKPREEQFNSTYRVVSVLTVLHQDWLNGKEYKCKVSNKGLPSSIEKTISKAKGQPREPQVYVLPPSQEEMTKNQVSLLCLVKGFYPSDIAVEWESNGQPENNYLTWPPVLDSDGSFFLYSRLTVDKSRWQEGNVFSCSVMHEALHNHYTQKSLSLSLGGGSGGSEVQLVESGGGLVKPGGSLRLSCVASGFTFSSYNMNWVRQAPGKGLEWVSSISSSSSYIYYADSVKGRFTISRDNAKNSLYLQMNSLRAEDTAVYYCAREGISAYDALNVWGQGTMVTVSSGTEGKSSGSGSESKSTQSVLTQPPSVSAAPGQKVTISCSGSSSNIGNNYVSWYQQLPGTAPKLLIYDNNKRPSGIPDRFSGSKSGTSATLGITGLQTGDEADYYCGTWDSSLSAVVFGGGTKLTV

SEQ ID NO: 82 - protein, 218 aa, Artificial Sequence; identical to SEQ ID NO: 11
  BBBB1217 LC

SEQ ID NO: 83 - protein, 446 aa, Artificial Sequence; identical to SEQ ID NO: 27
  BBBB1217 HC2

SEQ ID NO: 84 - protein, 244 aa, Artificial Sequence
  TfR4 (scFv)
EVQLLESGGGLVQPGGSLRLSCAASGFTFSSYAMNWVRQAPGKGLEWVSGISGSGVSTNYADSVKGRFTISRDNSKNTLDLQMNSLRAEDTAVYYCAKEDYDSSGYYPFDYWGQGTLVTVSSGTEGKSSGSGSESKSTSYEVTQPPSVSVSPGQTASITCSGHKLGDKFACWYQQKPGQSPVLVIYQDRKRPSGIPERFSGSNSGNTATLTISGTQAMDEADYYCQTWYSSTVIFGGGTKLTVL

SEQ ID NO: 85 - protein, 11 aa, Artificial Sequence
  TfR4 HCDR1
GFTFSSYAMNW

SEQ ID NO: 86 - protein, 11 aa, Artificial Sequence
  TfR4 HCDR2
SGISGSGVSTN

SEQ ID NO: 87 - protein, 16 aa, Artificial Sequence
  TfR4 HCDR3
CAKEDYDSSGYYPFDY

SEQ ID NO: 88 - protein, 7 aa, Artificial Sequence
  TfR4 LCDR1
HKLGDKF

SEQ ID NO: 89 - protein, 7 aa, Artificial Sequence
  TfR4 LCDR2
QDRKRPS

SEQ ID NO: 90 - protein, 9 aa, Artificial Sequence
  TfR4 LCDR3
QTWYSSTVI

SEQ ID NO: 91 - protein, 699 aa, Artificial Sequence
  BBBB520 HC1
QITLKESGPTLVKPTQTLTLTCTFSGFSLSTSGMGVSWIRQPPGKALEWLAHIYWDDDKRYNPSLKSRLTITKDTSKNQVVLTMTNMDPVDTATYYCARLYGFTYGFAYWGQGTLVTVSSASTKGPSVFPLAPSSKSTSGGTAALGCLVKDYFPEPVTVSWNSGALTSGVHTFPAVLQSSGLYSLSSVVTVPSSSLGTQTYICNVNHKPSNTKVDKRVEPKSCDKTHTCPPCPAPEAAGGPSVFLFPPKPKDTLMISRTPEVTCVVVSVSHEDPEVKFNWYVDGVEVHNAKTKPREEQYNSTYRVVSVLTVLHQDWLNGKEYKCKVSNKALPAPIEKTISKAKGQPREPQVYVLPPSREEMTKNQVSLLCLVKGFYPSDIAVEWESNGQPENNYLTWPPVLDSDGSFFLYSKLTVDKSRWQQGNVFSCSVMHEALHNHYTQKSLSLSPGGGSGGSEVQLLESGGGLVQPGGSLRLSCAASGFTFSSYAMNWVRQAPGKGLEWVSGISGSGVSTNYADSVKGRFTISRDNSKNTLDLQMNSLRAEDTAVYYCAKEDYDSSGYYPFDYWGQGTLVTVSSGTEGKSSGSGSESKSTSYEVTQPPSVSVSPGQTASITCSGHKLGDKFACWYQQKPGQSPVLVIYQDRKRPSGIPERFSGSNSGNTATLTISGTQAMDEADYYCQTWYSSTVIFGGGTKLTVL

SEQ ID NO: 92 - protein, 218 aa, Artificial Sequence; identical to SEQ ID NO: 11
  BBBB520 LC

SEQ ID NO: 93 - protein, 449 aa, Artificial Sequence; identical to SEQ ID NO: 12
  BBBB520 HC2

SEQ ID NO: 94 - protein, 699 aa, Artificial Sequence
  BBBB975 HC1
QVQLVQSGAEVKKPGSSVKVSCKASGGTLSHYGVSWVRQAPGQGLEWMGNIIPGIGTANYAQKFQGRVTITADESTSTAYMELSSLRSEDTAVYYCARSGGTKYGMLDVWGQGTMVTVSSASTKGPSVFPLAPSSKSTSGGTAALGCLVKDYFPEPVTVSWNSGALTSGVHTFPAVLQSSGLYSLSSVVTVPSSSLGTQTYICNVNHKPSNTKVDKRVEPKSCDKTHTCPPCPAPEAAGGPSVFLFPPKPKDTLMISRTPEVTCVVVSVSHEDPEVKFNWYVDGVEVHNAKTKPREEQYNSTYRVVSVLTVLHQDWLNGKEYKCKVSNKALPAPIEKTISKAKGQPREPQVYVLPPSREEMTKNQVSLLCLVKGFYPSDIAVEWESNGQPENNYLTWPPVLDSDGSFFLYSKLTVDKSRWQQGNVFSCSVMHEALHNHYTQKSLSLSPGGGSGGSEVQLLESGGGLVQPGGSLRLSCAASGFTFSSYAMNWVRQAPGKGLEWVSGISGSGVSTNYADSVKGRFTISRDNSKNTLDLQMNSLRAEDTAVYYCAKEDYDSSGYYPFDYWGQGTLVTVSSGTEGKSSGSGSESKSTSYEVTQPPSVSVSPGQTASITCSGHKLGDKFACWYQQKPGQSPVLVIYQDRKRPSGIPERFSGSNSGNTATLTISGTQAMDEADYYCQTWYSSTVIFGGGTKLTVL

SEQ ID NO: 95 - protein, 215 aa, Artificial Sequence; identical to SEQ ID NO: 14
  BBBB975 LC

SEQ ID NO: 96 - protein, 449 aa, Artificial Sequence; identical to SEQ ID NO: 15
  BBBB975 HC2

SEQ ID NO: 97 - protein, 701 aa, Artificial Sequence
  BBBB1026 HC1
EVQLVESGGGLVKPGGSLRLSCAASGFTFSSYAMSWVRQAPGKGLEWVASISKGGNTYYPDSVKGRFTISRDNAKNSLYLQMNSLRAEDTAVYYCARGWGDYGWFAYWGQVTLVTVSSASTKGPSVFPLAPSSKSTSGGTAALGCLVKDYFPEPVTVSWNSGALTSGVHTFPAVLQSSGLYSLSSVVTVPSSSLGTQTYICNVNHKPSNTKVDKKVEPKSCDKTHTCPPCPAPEAAGGPSVFLFPPKPKDTLYITREPEVTCVVVSVSHEDPEVKFNWYVDGVEVHNAKTKPREEQYNSTYRVVSVLTVLHQDWLNGKEYKCKVSNKALPAPIEKTISKAKGQPREPQVYVYPPSREEMTKNQVSLTCLVKGFYPSDIAVEWESNGQPENNYKTTPPVLDSDGSFALVSKLTVDKSRWQQGNVFSCSVMHEALHNHYTQKSLSLSPGGGAGGAEVQLLESGGGLVQPGGSLRLSCAASGFTFSSYAMNWVRQAPGKGLEWVSGISGSGVSTNYADSVKGRFTISRDNSKNTLDLQMNSLRAEDTAVYYCAKEDYDSSGYYPFDYWGQGTLVTVSSGGSEGKSSGSGSESKSTGGSSYEVTQPPSVSVSPGQTASITCSGHKLGDKFACWYQQKPGQSPVLVIYQDRKRPSGIPERFSGSNSGNTATLTISGTQAMDEADYYCQTWYSSTVIFGGGTKLTVL

SEQ ID NO: 98 - protein, 214 aa, Artificial Sequence; identical to SEQ ID NO: 17
  BBBB1026 LC

SEQ ID NO: 99 - protein, 447 aa, Artificial Sequence; identical to SEQ ID NO: 46
  BBBB1026 HC2

SEQ ID NO: 100 - protein, 701 aa, Artificial Sequence
  BBBB1024 HC1
EVQLVESGGGLVKPGGSLRLSCAASGFTFSSYAMSWVRQAPGKGLEWVASISKGGNTYYPDSVKGRFTISRDNAKNSLYLQMNSLRAEDTAVYYCARGWGDYGWFAYWGQVTLVTVSSASTKGPSVFPLAPSSKSTSGGTAALGCLVKDYFPEPVTVSWNSGALTSGVHTFPAVLQSSGLYSLSSVVTVPSSSLGTQTYICNVNHKPSNTKVDKKVEPKSCDKTHTCPPCPAPELLGGPSVFLFPPKPKDTLMISRTPEVTCVVVDVSHEDPEVKFNWYVDGVEVHNAKTKPREEQYNSTYRVVSVLTVLHQDWLNGKEYKCKVSNKALPAPIEKTISKAKGQPREPQVYVYPPSREEMTKNQVSLTCLVKGFYPSDIAVEWESNGQPENNYKTTPPVLDSDGSFALVSKLTVDKSRWQQGNVFSCSVMHEALHNHYTQKSLSLSPGGGAGGAEVQLLESGGGLVQPGGSLRLSCAASGFTFSSYAMNWVRQAPGKGLEWVSGISGSGVSTNYADSVKGRFTISRDNSKNTLDLQMNSLRAEDTAVYYCAKEDYDSSGYYPFDYWGQGTLVTVSSGGSEGKSSGSGSESKSTGGSSYEVTQPPSVSVSPGQTASITCSGHKLGDKFACWYQQKPGQSPVLVIYQDRKRPSGIPERFSGSNSGNTATLTISGTQAMDEADYYCQTWYSSTVIFGGGTKLTVL

SEQ ID NO: 101 - protein, 214 aa, Artificial Sequence; identical to SEQ ID NO: 17
  BBBB1024 LC

SEQ ID NO: 102 - protein, 447 aa, Artificial Sequence; identical to SEQ ID NO: 18
  BBBB1024 HC2

SEQ ID NO: 103 - protein, 699 aa, Artificial Sequence
  BBBB1082 HC1
QVQLVQSGAEVKKPGASVKVSCKASGHVFTSYDMYWVRQAPGQGLEWIGYIDSDSGDTSYNQKFKGRVTLTVDTSTSTVYMELSSLRSEDTAVYYCAYYRYAMDYWGQGTLVTVSSASTKGPSVFPLAPSSKSTSGGTAALGCLVKDYFPEPVTVSWNSGALTSGVHTFPAVLQSSGLYSLSSVVTVPSSSLGTQTYICNVNHKPSNTKVDKKVEPKSCDKTHTCPPCPAPEAAGGPSVFLFPPKPKDTLYITREPEVTCVVVSVSHEDPEVKFNWYVDGVEVHNAKTKPREEQYNSTYRVVSVLTVLHQDWLNGKEYKCKVSNKALPAPIEKTISKAKGQPREPQVYVYPPSREEMTKNQVSLTCLVKGFYPSDIAVEWESNGQPENNYKTTPPVLDSDGSFALVSKLTVDKSRWQQGNVFSCSVMHEALHNHYTQKSLSLSPGGGAGGAEVQLLESGGGLVQPGGSLRLSCAASGFTFSSYAMNWVRQAPGKGLEWVSGISGSGVSTNYADSVKGRFTISRDNSKNTLDLQMNSLRAEDTAVYYCAKEDYDSSGYYPFDYWGQGTLVTVSSGGSEGKSSGSGSESKSTGGSSYEVTQPPSVSVSPGQTASITCSGHKLGDKFACWYQQKPGQSPVLVIYQDRKRPSGIPERFSGSNSGNTATLTISGTQAMDEADYYCQTWYSSTVIFGGGTKLTVL

SEQ ID NO: 104 - protein, 219 aa, Artificial Sequence; identical to SEQ ID NO: 23
  BBBB1082 LC

SEQ ID NO: 105 - protein, 445 aa, Artificial Sequence; identical to SEQ ID NO: 24
  BBBB1082 HC2

SEQ ID NO: 106 - protein, 696 aa, Artificial Sequence
  BBBB1218 HC1
QITLKESGPTLVKPTQTLTLTCTFSGFSLSTSGMGVSWIRQPPGKALEWLAHIYWDDDKRYNPSLKSRLTITKDTSKNQVVLTMTNMDPVDTATYYCARLYGFTYGFAYWGQGTLVTVSSASTKGPSVFPLAPCSRSTSESTAALGCLVKDYFPEPVTVSWNSGALTSGVHTFPAVLQSSGLYSLSSVVTVPSSSLGTKTYTCNVDHKPSNTKVDKRVESKYGPPCPPCPAPEAAGGPSVFLFPPKPKDTLMISRTPEVTCVVVDVSQEDPEVQFNWYVDGVEVHNAKTKPREEQFNSTYRVVSVLTVLHQDWLNGKEYKCKVSNKGLPSSIEKTISKAKGQPREPQVYVLPPSQEEMTKNQVSLLCLVKGFYPSDIAVEWESNGQPENNYLTWPPVLDSDGSFFLYSRLTVDKSRWQEGNVFSCSVMHEALHNHYTQKSLSLSLGGGSGGSEVQLLESGGGLVQPGGSLRLSCAASGFTFSSYAMNWVRQAPGKGLEWVSGISGSGVSTNYADSVKGRFTISRDNSKNTLDLQMNSLRAEDTAVYYCAKEDYDSSGYYPFDYWGQGTLVTVSSGTEGKSSGSGSESKSTSYEVTQPPSVSVSPGQTASITCSGHKLGDKFACWYQQKPGQSPVLVIYQDRKRPSGIPERFSGSNSGNTATLTISGTQAMDEADYYCQTWYSSTVIFGGGTKLTVL

SEQ ID NO: 107 - protein, 218 aa, Artificial Sequence; identical to SEQ ID NO: 11
  BBBB1218 LC

SEQ ID NO: 108 - protein, 446 aa, Artificial Sequence; identical to SEQ ID NO: 27
  BBBB1218 HC2

SEQ ID NO: 109 - protein, 246 aa, Artificial Sequence
  TfR5 (scFv)
QVQLVESGGGVVQPGRSLRLSCAASGFTFSSDAMHWVRQAPGKGLEWVAVIWYDGSNKYSADSVKGRFTISRDNSKNTLYLQMNSLRAEDTAVYYCARDRQWLAFDYWGQGTLVTVSSGTEGKSSGSGSESKSTQSALTQPPSASGSPGQSVTISCSGTSSDVGGYNFVSWYQQHPGKAPKLMISEVSKRPSGVPDRFSGSKSGNTASLTVSGLQAEDEADYYCSSYRDSNNFDVLFGGGTKLTVL

SEQ ID NO: 110 - protein, 11 aa, Artificial Sequence
  TfR5 HCDR1
GFTFSSDAMHW

SEQ ID NO: 111 - protein, 11 aa, Artificial Sequence
  TfR5 HCDR2
AVIWYDGSNKY

SEQ ID NO: 112 - protein, 12 aa, Artificial Sequence
  TfR5 HCDR3
CARDRQWLAFDY

SEQ ID NO: 113 - protein, 9 aa, Artificial Sequence
  TfR5 LCDR1
SSDVGGYNF

SEQ ID NO: 114 - protein, 7 aa, Artificial Sequence
  TfR5 LCDR2
EVSKRPS

SEQ ID NO: 115 - protein, 11 aa, Artificial Sequence
  TfR5 LCDR3
SYRDSNNFDVL

SEQ ID NO: 116 - protein, 701 aa, Artificial Sequence
  BBBB534 HC1
QITLKESGPTLVKPTQTLTLTCTFSGFSLSTSGMGVSWIRQPPGKALEWLAHIYWDDDKRYNPSLKSRLTITKDTSKNQVVLTMTNMDPVDTATYYCARLYGFTYGFAYWGQGTLVTVSSASTKGPSVFPLAPSSKSTSGGTAALGCLVKDYFPEPVTVSWNSGALTSGVHTFPAVLQSSGLYSLSSVVTVPSSSLGTQTYICNVNHKPSNTKVDKRVEPKSCDKTHTCPPCPAPEAAGGPSVFLFPPKPKDTLMISRTPEVTCVVVSVSHEDPEVKFNWYVDGVEVHNAKTKPREEQYNSTYRVVSVLTVLHQDWLNGKEYKCKVSNKALPAPIEKTISKAKGQPREPQVYVLPPSREEMTKNQVSLLCLVKGFYPSDIAVEWESNGQPENNYLTWPPVLDSDGSFFLYSKLTVDKSRWQQGNVFSCSVMHEALHNHYTQKSLSLSPGGGSGGSQVQLVESGGGVVQPGRSLRLSCAASGFTFSSDAMHWVRQAPGKGLEWVAVIWYDGSNKYSADSVKGRFTISRDNSKNTLYLQMNSLRAEDTAVYYCARDRQWLAFDYWGQGTLVTVSSGTEGKSSGSGSESKSTQSALTQPPSASGSPGQSVTISCSGTSSDVGGYNFVSWYQQHPGKAPKLMISEVSKRPSGVPDRFSGSKSGNTASLTVSGLQAEDEADYYCSSYRDSNNFDVLFGGGTKLTVL

SEQ ID NO: 117 - protein, 218 aa, Artificial Sequence; identical to SEQ ID NO: 11
  BBBB534 LC

SEQ ID NO: 118 - protein, 449 aa, Artificial Sequence; identical to SEQ ID NO: 12
  BBBB534 HC2

SEQ ID NO: 119 - protein, 701 aa, Artificial Sequence
  BBBB945 HC1
QITLKESGPTLVKPTQTLTLTCTFSGFSLSTSGMGVSWIRQPPGKALEWLAHIYWDDDKRYNPSLKSRLTITKDTSKNQVVLTMTNMDPVDTATYYCARLYGFTYGFAYWGQGTLVTVSSASTKGPSVFPLAPSSKSTSGGTAALGCLVKDYFPEPVTVSWNSGALTSGVHTFPAVLQSSGLYSLSSVVTVPSSSLGTQTYICNVNHKPSNTKVDKKVEPKSCDKTHTCPPCPAPELLGGPSVFLFPPKPKDTLMISRTPEVTCVVVDVSHEDPEVKFNWYVDGVEVHNAKTKPREEQYNSTYRVVSVLTVLHQDWLNGKEYKCKVSNKALPAPIEKTISKAKGQPREPQVYVYPPSRDELTKNQVSLTCLVKGFYPSDIAVEWESNGQPENNYKTTPPVLDSDGSFALVSKLTVDKSRWQQGNVFSCSVMHEALHNHYTQKSLSLSPGGGSGGSQVQLVESGGGVVQPGRSLRLSCAASGFTFSSDAMHWVRQAPGKGLEWVAVIWYDGSNKYSADSVKGRFTISRDNSKNTLYLQMNSLRAEDTAVYYCARDRQWLAFDYWGQGTLVTVSSGTEGKSSGSGSESKSTQSALTQPPSASGSPGQSVTISCSGTSSDVGGYNFVSWYQQHPGKAPKLMISEVSKRPSGVPDRFSGSKSGNTASLTVSGLQAEDEADYYCSSYRDSNNFDVLFGGGTKLTVL

SEQ ID NO: 120 - protein, 218 aa, Artificial Sequence; identical to SEQ ID NO: 11
  BBBB945 LC

SEQ ID NO: 121 - protein, 449 aa, Artificial Sequence; identical to SEQ ID NO: 68
  BBBB945 HC2

SEQ ID NO: 122 - protein, 701 aa, Artificial Sequence
  BBBB973 HC1
QVQLVQSGAEVKKPGSSVKVSCKASGGTLSHYGVSWVRQAPGQGLEWMGNIIPGIGTANYAQKFQGRVTITADESTSTAYMELSSLRSEDTAVYYCARSGGTKYGMLDVWGQGTMVTVSSASTKGPSVFPLAPSSKSTSGGTAALGCLVKDYFPEPVTVSWNSGALTSGVHTFPAVLQSSGLYSLSSVVTVPSSSLGTQTYICNVNHKPSNTKVDKRVEPKSCDKTHTCPPCPAPEAAGGPSVFLFPPKPKDTLMISRTPEVTCVVVSVSHEDPEVKFNWYVDGVEVHNAKTKPREEQYNSTYRVVSVLTVLHQDWLNGKEYKCKVSNKALPAPIEKTISKAKGQPREPQVYVLPPSREEMTKNQVSLLCLVKGFYPSDIAVEWESNGQPENNYLTWPPVLDSDGSFFLYSKLTVDKSRWQQGNVFSCSVMHEALHNHYTQKSLSLSPGGGSGGSQVQLVESGGGVVQPGRSLRLSCAASGFTFSSDAMHWVRQAPGKGLEWVAVIWYDGSNKYSADSVKGRFTISRDNSKNTLYLQMNSLRAEDTAVYYCARDRQWLAFDYWGQGTLVTVSSGTEGKSSGSGSESKSTQSALTQPPSASGSPGQSVTISCSGTSSDVGGYNFVSWYQQHPGKAPKLMISEVSKRPSGVPDRFSGSKSGNTASLTVSGLQAEDEADYYCSSYRDSNNFDVLFGGGTKLTVL

SEQ ID NO: 123 - protein, 215 aa, Artificial Sequence; identical to SEQ ID NO: 14
  BBBB973 LC

SEQ ID NO: 124 - protein, 449 aa, Artificial Sequence; identical to SEQ ID NO: 15
  BBBB973 HC2

SEQ ID NO: 125 - protein, 699 aa, Artificial Sequence
  BBBB1035 HC1
EVQLVESGGGLVKPGGSLRLSCAASGFTFSSYAMSWVRQAPGKGLEWVASISKGGNTYYPDSVKGRFTISRDNAKNSLYLQMNSLRAEDTAVYYCARGWGDYGWFAYWGQVTLVTVSSASTKGPSVFPLAPSSKSTSGGTAALGCLVKDYFPEPVTVSWNSGALTSGVHTFPAVLQSSGLYSLSSVVTVPSSSLGTQTYICNVNHKPSNTKVDKKVEPKSCDKTHTCPPCPAPEAAGGPSVFLFPPKPKDTLYITREPEVTCVVVSVSHEDPEVKFNWYVDGVEVHNAKTKPREEQYNSTYRVVSVLTVLHQDWLNGKEYKCKVSNKALPAPIEKTISKAKGQPREPQVYVYPPSREEMTKNQVSLTCLVKGFYPSDIAVEWESNGQPENNYKTTPPVLDSDGSFALVSKLTVDKSRWQQGNVFSCSVMHEALHNHYTQKSLSLSPGGGAGGAQVQLVESGGGVVQPGRSLRLSCAASGFTFSSDAMHWVRQAPGKGLEWVAVIWYDGSNKYSADSVKGRFTISRDNSKNTLYLQMNSLRAEDTAVYYCARDRQWLAFDYWGQGTLVTVSSGTEGKSSGSGSESKSTQSALTQPPSASGSPGQSVTISCSGTSSDVGGYNFVSWYQQHPGKAPKLMISEVSKRPSGVPDRFSGSKSGNTASLTVSGLQAEDEADYYCSSYRDSNNFDVLFGGGTKLTVL

SEQ ID NO: 126 - protein, 214 aa, Artificial Sequence; identical to SEQ ID NO: 17
  BBBB1035 LC

SEQ ID NO: 127 - protein, 447 aa, Artificial Sequence; identical to SEQ ID NO: 46
  BBBB1035 HC2

SEQ ID NO: 128 - protein, 699 aa, Artificial Sequence
  BBBB1033 HC1
EVQLVESGGGLVKPGGSLRLSCAASGFTFSSYAMSWVRQAPGKGLEWVASISKGGNTYYPDSVKGRFTISRDNAKNSLYLQMNSLRAEDTAVYYCARGWGDYGWFAYWGQVTLVTVSSASTKGPSVFPLAPSSKSTSGGTAALGCLVKDYFPEPVTVSWNSGALTSGVHTFPAVLQSSGLYSLSSVVTVPSSSLGTQTYICNVNHKPSNTKVDKKVEPKSCDKTHTCPPCPAPELLGGPSVFLFPPKPKDTLMISRTPEVTCVVVDVSHEDPEVKFNWYVDGVEVHNAKTKPREEQYNSTYRVVSVLTVLHQDWLNGKEYKCKVSNKALPAPIEKTISKAKGQPREPQVYVYPPSREEMTKNQVSLTCLVKGFYPSDIAVEWESNGQPENNYKTTPPVLDSDGSFALVSKLTVDKSRWQQGNVFSCSVMHEALHNHYTQKSLSLSPGGGAGGAQVQLVESGGGVVQPGRSLRLSCAASGFTFSSDAMHWVRQAPGKGLEWVAVIWYDGSNKYSADSVKGRFTISRDNSKNTLYLQMNSLRAEDTAVYYCARDRQWLAFDYWGQGTLVTVSSGTEGKSSGSGSESKSTQSALTQPPSASGSPGQSVTISCSGTSSDVGGYNFVSWYQQHPGKAPKLMISEVSKRPSGVPDRFSGSKSGNTASLTVSGLQAEDEADYYCSSYRDSNNFDVLFGGGTKLTVL

SEQ ID NO: 129 - protein, 214 aa, Artificial Sequence; identical to SEQ ID NO: 17
  BBBB1033 LC

SEQ ID NO: 130 - protein, 447 aa, Artificial Sequence; identical to SEQ ID NO: 18
  BBBB1033 HC2

SEQ ID NO: 131 - protein, 698 aa, Artificial Sequence
  BBBB1219 HC1
QITLKESGPTLVKPTQTLTLTCTFSGFSLSTSGMGVSWIRQPPGKALEWLAHIYWDDDKRYNPSLKSRLTITKDTSKNQVVLTMTNMDPVDTATYYCARLYGFTYGFAYWGQGTLVTVSSASTKGPSVFPLAPCSRSTSESTAALGCLVKDYFPEPVTVSWNSGALTSGVHTFPAVLQSSGLYSLSSVVTVPSSSLGTKTYTCNVDHKPSNTKVDKRVESKYGPPCPPCPAPEAAGGPSVFLFPPKPKDTLMISRTPEVTCVVVDVSQEDPEVQFNWYVDGVEVHNAKTKPREEQFNSTYRVVSVLTVLHQDWLNGKEYKCKVSNKGLPSSIEKTISKAKGQPREPQVYVLPPSQEEMTKNQVSLLCLVKGFYPSDIAVEWESNGQPENNYLTWPPVLDSDGSFFLYSRLTVDKSRWQEGNVFSCSVMHEALHNHYTQKSLSLSLGGGSGGSQVQLVESGGGVVQPGRSLRLSCAASGFTFSSDAMHWVRQAPGKGLEWVAVIWYDGSNKYSADSVKGRFTISRDNSKNTLYLQMNSLRAEDTAVYYCARDRQWLAFDYWGQGTLVTVSSGTEGKSSGSGSESKSTQSALTQPPSASGSPGQSVTISCSGTSSDVGGYNFVSWYQQHPGKAPKLMISEVSKRPSGVPDRFSGSKSGNTASLTVSGLQAEDEADYYCSSYRDSNNFDVLFGGGTKLTVL

SEQ ID NO: 132 - protein, 218 aa, Artificial Sequence; identical to SEQ ID NO: 11
  BBBB1219 LC

SEQ ID NO: 133 - protein, 446 aa, Artificial Sequence; identical to SEQ ID NO: 27
  BBBB1219 HC2

SEQ ID NO: 134 - protein, 244 aa, Artificial Sequence
  TfR6 (scFv)
EVQLLESGGGLVQPGGSLRLSCAASGFTFNNYVMNWVRQAPGKGLEWVSGISGSGGTTYYTDSVKGRFTISRDNSKNTLYLQMHSLRAEDTAIYYCAKEDDDSTGYYPFDYWGQGTLVTVSSGTEGKSSGSGSESKSTSYELTQPPSASVSPGQTASITCSGDKLGDKFVCWYQQKPGQSPVLAIYQDSKRPSGIPERFSGSNSGNTATLTISGTQAMDEADYYCQTWDRSTVVFGGGTKLTVL

SEQ ID NO: 135 - protein, 11 aa, Artificial Sequence
  TfR6 HCDR1
GFTFNNYVMNW

SEQ ID NO: 136 - protein, 8 aa, Artificial Sequence
  TfR6 HCDR2
ISGSGGTT

SEQ ID NO: 137 - protein, 16 aa, Artificial Sequence
  TfR6 HCDR3
CAKEDDDSTGYYPFDY

SEQ ID NO: 138 - protein, 7 aa, Artificial Sequence
  TfR6 LCDR1
KLGDKFV

SEQ ID NO: 139 - protein, 7 aa, Artificial Sequence
  TfR6 LCDR2
QDSKRPS

SEQ ID NO: 140 - protein, 9 aa, Artificial Sequence
  TfR6 LCDR3
QTWDRSTVV

SEQ ID NO: 141 - protein, 699 aa, Artificial Sequence
  BBBB537 HC1
QITLKESGPTLVKPTQTLTLTCTFSGFSLSTSGMGVSWIRQPPGKALEWLAHIYWDDDKRYNPSLKSRLTITKDTSKNQVVLTMTNMDPVDTATYYCARLYGFTYGFAYWGQGTLVTVSSASTKGPSVFPLAPSSKSTSGGTAALGCLVKDYFPEPVTVSWNSGALTSGVHTFPAVLQSSGLYSLSSVVTVPSSSLGTQTYICNVNHKPSNTKVDKRVEPKSCDKTHTCPPCPAPEAAGGPSVFLFPPKPKDTLMISRTPEVTCVVVSVSHEDPEVKFNWYVDGVEVHNAKTKPREEQYNSTYRVVSVLTVLHQDWLNGKEYKCKVSNKALPAPIEKTISKAKGQPREPQVYVLPPSREEMTKNQVSLLCLVKGFYPSDIAVEWESNGQPENNYLTWPPVLDSDGSFFLYSKLTVDKSRWQQGNVFSCSVMHEALHNHYTQKSLSLSPGGGSGGSEVQLLESGGGLVQPGGSLRLSCAASGFTFNNYVMNWVRQAPGKGLEWVSGISGSGGTTYYTDSVKGRFTISRDNSKNTLYLQMHSLRAEDTAIYYCAKEDDDSTGYYPFDYWGQGTLVTVSSGTEGKSSGSGSESKSTSYELTQPPSASVSPGQTASITCSGDKLGDKFVCWYQQKPGQSPVLAIYQDSKRPSGIPERFSGSNSGNTATLTISGTQAMDEADYYCQTWDRSTVVFGGGTKLTVL

SEQ ID NO: 142 - protein, 218 aa, Artificial Sequence; identical to SEQ ID NO: 11
  BBBB537 LC

SEQ ID NO: 143 - protein, 449 aa, Artificial Sequence; identical to SEQ ID NO: 12
  BBBB537 HC2

SEQ ID NO: 144 - protein, 699 aa, Artificial Sequence
  BBBB989 HC1
QITLKESGPTLVKPTQTLTLTCTFSGFSLSTSGMGVSWIRQPPGKALEWLAHIYWDDDKRYNPSLKSRLTITKDTSKNQVVLTMTNMDPVDTATYYCARLYGFTYGFAYWGQGTLVTVSSASTKGPSVFPLAPSSKSTSGGTAALGCLVKDYFPEPVTVSWNSGALTSGVHTFPAVLQSSGLYSLSSVVTVPSSSLGTQTYICNVNHKPSNTKVDKKVEPKSCDKTHTCPPCPAPELLGGPSVFLFPPKPKDTLMISRTPEVTCVVVDVSHEDPEVKFNWYVDGVEVHNAKTKPREEQYNSTYRVVSVLTVLHQDWLNGKEYKCKVSNKALPAPIEKTISKAKGQPREPQVYVYPPSRDELTKNQVSLTCLVKGFYPSDIAVEWESNGQPENNYKTTPPVLDSDGSFALVSKLTVDKSRWQQGNVFSCSVMHEALHNHYTQKSLSLSPGGGSGGSEVQLLESGGGLVQPGGSLRLSCAASGFTFNNYVMNWVRQAPGKGLEWVSGISGSGGTTYYTDSVKGRFTISRDNSKNTLYLQMHSLRAEDTAIYYCAKEDDDSTGYYPFDYWGQGTLVTVSSGTEGKSSGSGSESKSTSYELTQPPSASVSPGQTASITCSGDKLGDKFVCWYQQKPGQSPVLAIYQDSKRPSGIPERFSGSNSGNTATLTISGTQAMDEADYYCQTWDRSTVVFGGGTKLTVL

SEQ ID NO: 145 - protein, 218 aa, Artificial Sequence; identical to SEQ ID NO: 11
  BBBB989 LC

SEQ ID NO: 146 - protein, 449 aa, Artificial Sequence; identical to SEQ ID NO: 68
  BBBB989 HC2

SEQ ID NO: 147 - protein, 699 aa, Artificial Sequence
  BBBB977 HC1
QVQLVQSGAEVKKPGSSVKVSCKASGGTLSHYGVSWVRQAPGQGLEWMGNIIPGIGTANYAQKFQGRVTITADESTSTAYMELSSLRSEDTAVYYCARSGGTKYGMLDVWGQGTMVTVSSASTKGPSVFPLAPSSKSTSGGTAALGCLVKDYFPEPVTVSWNSGALTSGVHTFPAVLQSSGLYSLSSVVTVPSSSLGTQTYICNVNHKPSNTKVDKRVEPKSCDKTHTCPPCPAPEAAGGPSVFLFPPKPKDTLMISRTPEVTCVVVSVSHEDPEVKFNWYVDGVEVHNAKTKPREEQYNSTYRVVSVLTVLHQDWLNGKEYKCKVSNKALPAPIEKTISKAKGQPREPQVYVLPPSREEMTKNQVSLLCLVKGFYPSDIAVEWESNGQPENNYLTWPPVLDSDGSFFLYSKLTVDKSRWQQGNVFSCSVMHEALHNHYTQKSLSLSPGGGSGGSEVQLLESGGGLVQPGGSLRLSCAASGFTFNNYVMNWVRQAPGKGLEWVSGISGSGGTTYYTDSVKGRFTISRDNSKNTLYLQMHSLRAEDTAIYYCAKEDDDSTGYYPFDYWGQGTLVTVSSGTEGKSSGSGSESKSTSYELTQPPSASVSPGQTASITCSGDKLGDKFVCWYQQKPGQSPVLAIYQDSKRPSGIPERFSGSNSGNTATLTISGTQAMDEADYYCQTWDRSTVVFGGGTKLTVL

SEQ ID NO: 148 - protein, 215 aa, Artificial Sequence; identical to SEQ ID NO: 14
  BBBB977 LC

SEQ ID NO: 149 - protein, 449 aa, Artificial Sequence; identical to SEQ ID NO: 15
  BBBB977 HC2

SEQ ID NO: 150 - protein, 697 aa, Artificial Sequence
  BBBB1038 HC1
EVQLVESGGGLVKPGGSLRLSCAASGFTFSSYAMSWVRQAPGKGLEWVASISKGGNTYYPDSVKGRFTISRDNAKNSLYLQMNSLRAEDTAVYYCARGWGDYGWFAYWGQVTLVTVSSASTKGPSVFPLAPSSKSTSGGTAALGCLVKDYFPEPVTVSWNSGALTSGVHTFPAVLQSSGLYSLSSVVTVPSSSLGTQTYICNVNHKPSNTKVDKKVEPKSCDKTHTCPPCPAPEAAGGPSVFLFPPKPKDTLYITREPEVTCVVVSVSHEDPEVKFNWYVDGVEVHNAKTKPREEQYNSTYRVVSVLTVLHQDWLNGKEYKCKVSNKALPAPIEKTISKAKGQPREPQVYVYPPSREEMTKNQVSLTCLVKGFYPSDIAVEWESNGQPENNYKTTPPVLDSDGSFALVSKLTVDKSRWQQGNVFSCSVMHEALHNHYTQKSLSLSPGGGAGGAEVQLLESGGGLVQPGGSLRLSCAASGFTFNNYVMNWVRQAPGKGLEWVSGISGSGGTTYYTDSVKGRFTISRDNSKNTLYLQMHSLRAEDTAIYYCAKEDDDSTGYYPFDYWGQGTLVTVSSGTEGKSSGSGSESKSTSYELTQPPSASVSPGQTASITCSGDKLGDKFVCWYQQKPGQSPVLAIYQDSKRPSGIPERFSGSNSGNTATLTISGTQAMDEADYYCQTWDRSTVVFGGGTKLTVL

SEQ ID NO: 151 - protein, 214 aa, Artificial Sequence; identical to SEQ ID NO: 17
  BBBB1038 LC

SEQ ID NO: 152 - protein, 446 aa, Artificial Sequence
  BBBB1038 HC2
EVQLVESGGGLVKPGGSLRLSCAASGFTFSSYAMSWVRQAPGKGLEWVASISKGGNTYYPDSVKGRFTISRDNAKNSLYLQMNSLRAEDTAVYYCARGWGDYGWFAYWGQVTLVTVSSASTKGPSVFPLAPSSKSTSGGTAALGCLVKDYFPEPVTVSWNSGALTSGVHTFPAVLQSSGLYSLSSVVTVPSSSLGTQTYICNVNHKPSNTKVDKKVEPKSCDKTHTCPPCPAPEAAGGPSVFLFPPKPKDTLYITREPEVTCVVVSVSHEDPEVKFNWYVDGVEVHNAKTKPREEQYNSTYRVVSVLTVLHQDWLNGKEYKCKVSNKALPAPIEKTISKAKGQPREPQVYVLPPSREEMTKNQVSLLCLVKGFYPSDIAVEWESNGQPENNYLTWPPVLDSDGSFFLYSKLTVDKSRWQQGNVFSCSVMHEALHNHYTQKSLSLSP

SEQ ID NO: 153 - protein, 697 aa, Artificial Sequence
  BBBB1036 HC1
EVQLVESGGGLVKPGGSLRLSCAASGFTFSSYAMSWVRQAPGKGLEWVASISKGGNTYYPDSVKGRFTISRDNAKNSLYLQMNSLRAEDTAVYYCARGWGDYGWFAYWGQVTLVTVSSASTKGPSVFPLAPSSKSTSGGTAALGCLVKDYFPEPVTVSWNSGALTSGVHTFPAVLQSSGLYSLSSVVTVPSSSLGTQTYICNVNHKPSNTKVDKKVEPKSCDKTHTCPPCPAPELLGGPSVFLFPPKPKDTLMISRTPEVTCVVVDVSHEDPEVKFNWYVDGVEVHNAKTKPREEQYNSTYRVVSVLTVLHQDWLNGKEYKCKVSNKALPAPIEKTISKAKGQPREPQVYVYPPSREEMTKNQVSLTCLVKGFYPSDIAVEWESNGQPENNYKTTPPVLDSDGSFALVSKLTVDKSRWQQGNVFSCSVMHEALHNHYTQKSLSLSPGGGAGGAEVQLLESGGGLVQPGGSLRLSCAASGFTFNNYVMNWVRQAPGKGLEWVSGISGSGGTTYYTDSVKGRFTISRDNSKNTLYLQMHSLRAEDTAIYYCAKEDDDSTGYYPFDYWGQGTLVTVSSGTEGKSSGSGSESKSTSYELTQPPSASVSPGQTASITCSGDKLGDKFVCWYQQKPGQSPVLAIYQDSKRPSGIPERFSGSNSGNTATLTISGTQAMDEADYYCQTWDRSTVVFGGGTKLTVL

SEQ ID NO: 154 - protein, 214 aa, Artificial Sequence; identical to SEQ ID NO: 17
  BBBB1036 LC

SEQ ID NO: 155 - protein, 447 aa, Artificial Sequence; identical to SEQ ID NO: 18
  BBBB1036 HC2

SEQ ID NO: 156 - protein, 695 aa, Artificial Sequence
  BBBB1085 HC1
QVQLVQSGAEVKKPGASVKVSCKASGHVFTSYDMYWVRQAPGQGLEWIGYIDSDSGDTSYNQKFKGRVTLTVDTSTSTVYMELSSLRSEDTAVYYCAYYRYAMDYWGQGTLVTVSSASTKGPSVFPLAPSSKSTSGGTAALGCLVKDYFPEPVTVSWNSGALTSGVHTFPAVLQSSGLYSLSSVVTVPSSSLGTQTYICNVNHKPSNTKVDKKVEPKSCDKTHTCPPCPAPEAAGGPSVFLFPPKPKDTLYITREPEVTCVVVSVSHEDPEVKFNWYVDGVEVHNAKTKPREEQYNSTYRVVSVLTVLHQDWLNGKEYKCKVSNKALPAPIEKTISKAKGQPREPQVYVYPPSREEMTKNQVSLTCLVKGFYPSDIAVEWESNGQPENNYKTTPPVLDSDGSFALVSKLTVDKSRWQQGNVFSCSVMHEALHNHYTQKSLSLSPGGGAGGAEVQLLESGGGLVQPGGSLRLSCAASGFTFNNYVMNWVRQAPGKGLEWVSGISGSGGTTYYTDSVKGRFTISRDNSKNTLYLQMHSLRAEDTAIYYCAKEDDDSTGYYPFDYWGQGTLVTVSSGTEGKSSGSGSESKSTSYELTQPPSASVSPGQTASITCSGDKLGDKFVCWYQQKPGQSPVLAIYQDSKRPSGIPERFSGSNSGNTATLTISGTQAMDEADYYCQTWDRSTVVFGGGTKLTVL

SEQ ID NO: 157 - protein, 219 aa, Artificial Sequence; identical to SEQ ID NO: 23
  BBBB1085 LC

SEQ ID NO: 158 - protein, 445 aa, Artificial Sequence; identical to SEQ ID NO: 24
  BBBB1085 HC2

SEQ ID NO: 159 - protein, 696 aa, Artificial Sequence
  BBBB1220 HC1
QITLKESGPTLVKPTQTLTLTCTFSGFSLSTSGMGVSWIRQPPGKALEWLAHIYWDDDKRYNPSLKSRLTITKDTSKNQVVLTMTNMDPVDTATYYCARLYGFTYGFAYWGQGTLVTVSSASTKGPSVFPLAPCSRSTSESTAALGCLVKDYFPEPVTVSWNSGALTSGVHTFPAVLQSSGLYSLSSVVTVPSSSLGTKTYTCNVDHKPSNTKVDKRVESKYGPPCPPCPAPEAAGGPSVFLFPPKPKDTLMISRTPEVTCVVVDVSQEDPEVQFNWYVDGVEVHNAKTKPREEQFNSTYRVVSVLTVLHQDWLNGKEYKCKVSNKGLPSSIEKTISKAKGQPREPQVYVLPPSQEEMTKNQVSLLCLVKGFYPSDIAVEWESNGQPENNYLTWPPVLDSDGSFFLYSRLTVDKSRWQEGNVFSCSVMHEALHNHYTQKSLSLSLGGGSGGSEVQLLESGGGLVQPGGSLRLSCAASGFTFNNYVMNWVRQAPGKGLEWVSGISGSGGTTYYTDSVKGRFTISRDNSKNTLYLQMHSLRAEDTAIYYCAKEDDDSTGYYPFDYWGQGTLVTVSSGTEGKSSGSGSESKSTSYELTQPPSASVSPGQTASITCSGDKLGDKFVCWYQQKPGQSPVLAIYQDSKRPSGIPERFSGSNSGNTATLTISGTQAMDEADYYCQTWDRSTVVFGGGTKLTVL

SEQ ID NO: 160 - protein, 218 aa, Artificial Sequence; identical to SEQ ID NO: 11
  BBBB1220 LC

SEQ ID NO: 161 - protein, 446 aa, Artificial Sequence; identical to SEQ ID NO: 27
  BBBB1220 HC2

SEQ ID NO: 162 - protein, 244 aa, Artificial Sequence
  TfR7
EVQLLESGGGLVQPGGSLRLSCADSGFTFSSYAMNWVRQAPGKGLEWVSGISGSGGHTYYADSVKGRFTVSRDNSKNTLYLQMNSLRAEDTAVYYCAREGYDSSGYNPFDYWGQGTQVTVSSGTEGKSSGSGSESKSTSYELTQPPSVSVSPGQTASITCSGDKLGDKYACWYQQKPGQSPVLVIYQDSKRPSGIPERFSGSNSGNTATLTISGTQAMDEADYYCQAWDSSTVVFGGGTKLTVL

SEQ ID NO: 163 - protein, 11 aa, Artificial Sequence
  TfR7 HCDR1
GFTFSSYAMNW

SEQ ID NO: 164 - protein, 8 aa, Artificial Sequence
  TfR7 HCDR2
ISGSGGHT

SEQ ID NO: 165 - protein, 16 aa, Artificial Sequence
  TfR7 HCDR3
CAREGYDSSGYNPFDY

SEQ ID NO: 166 - protein, 7 aa, Artificial Sequence
  TfR7 LCDR1
KLGDKYA

SEQ ID NO: 167 - protein, 7 aa, Artificial Sequence
  TfR7 LCDR2
QDSKRPS

SEQ ID NO: 168 - protein, 9 aa, Artificial Sequence
  TfR7 LCDR3
QAWDSSTVV

SEQ ID NO: 169 - protein, 699 aa, Artificial Sequence
  BBBB543 HC1
QITLKESGPTLVKPTQTLTLTCTFSGFSLSTSGMGVSWIRQPPGKALEWLAHIYWDDDKRYNPSLKSRLTITKDTSKNQVVLTMTNMDPVDTATYYCARLYGFTYGFAYWGQGTLVTVSSASTKGPSVFPLAPSSKSTSGGTAALGCLVKDYFPEPVTVSWNSGALTSGVHTFPAVLQSSGLYSLSSVVTVPSSSLGTQTYICNVNHKPSNTKVDKRVEPKSCDKTHTCPPCPAPEAAGGPSVFLFPPKPKDTLMISRTPEVTCVVVSVSHEDPEVKFNWYVDGVEVHNAKTKPREEQYNSTYRVVSVLTVLHQDWLNGKEYKCKVSNKALPAPIEKTISKAKGQPREPQVYVLPPSREEMTKNQVSLLCLVKGFYPSDIAVEWESNGQPENNYLTWPPVLDSDGSFFLYSKLTVDKSRWQQGNVFSCSVMHEALHNHYTQKSLSLSPGGGSGGSEVQLLESGGGLVQPGGSLRLSCADSGFTFSSYAMNWVRQAPGKGLEWVSGISGSGGHTYYADSVKGRFTVSRDNSKNTLYLQMNSLRAEDTAVYYCAREGYDSSGYNPFDYWGQGTQVTVSSGTEGKSSGSGSESKSTSYELTQPPSVSVSPGQTASITCSGDKLGDKYACWYQQKPGQSPVLVIYQDSKRPSGIPERFSGSNSGNTATLTISGTQAMDEADYYCQAWDSSTVVFGGGTKLTVL

SEQ ID NO: 170 - protein, 218 aa, Artificial Sequence; identical to SEQ ID NO: 11
  BBBB543 LC

SEQ ID NO: 171 - protein, 449 aa, Artificial Sequence; identical to SEQ ID NO: 12
  BBBB543 HC2

SEQ ID NO: 172 - protein, 699 aa, Artificial Sequence
  BBBB1112 HC1
QITLKESGPTLVKPTQTLTLTCTFSGFSLSTSGMGVSWIRQPPGKALEWLAHIYWDDDKRYNPSLKSRLTITKDTSKNQVVLTMTNMDPVDTATYYCARLYGFTYGFAYWGQGTLVTVSSASTKGPSVFPLAPSSKSTSGGTAALGCLVKDYFPEPVTVSWNSGALTSGVHTFPAVLQSSGLYSLSSVVTVPSSSLGTQTYICNVNHKPSNTKVDKRVEPKSCDKTHTCPPCPAPELLGGPSVFLFPPKPKDTLMISRTPEVTCVVVDVSHEDPEVKFNWYVDGVEVHNAKTKPREEQYNSTYRVVSVLTVLHQDWLNGKEYKCKVSNKALPAPIEKTISKAKGQPREPQVYVLPPSREEMTKNQVSLLCLVKGFYPSDIAVEWESNGQPENNYLTWPPVLDSDGSFFLYSKLTVDKSRWQQGNVFSCSVMHEALHNHYTQKSLSLSPGGGSGGSEVQLLESGGGLVQPGGSLRLSCADSGFTFSSYAMNWVRQAPGKGLEWVSGISGSGGHTYYADSVKGRFTVSRDNSKNTLYLQMNSLRAEDTAVYYCAREGYDSSGYNPFDYWGQGTQVTVSSGTEGKSSGSGSESKSTSYELTQPPSVSVSPGQTASITCSGDKLGDKYACWYQQKPGQSPVLVIYQDSKRPSGIPERFSGSNSGNTATLTISGTQAMDEADYYCQAWDSSTVVFGGGTKLTVL

SEQ ID NO: 173 - protein, 218 aa, Artificial Sequence; identical to SEQ ID NO: 11
  BBBB1112 LC

SEQ ID NO: 174 - protein, 449 aa, Artificial Sequence; identical to SEQ ID NO: 12
  BBBB1112 HC2

SEQ ID NO: 175 - protein, 699 aa, Artificial Sequence
  BBBB969 HC1
QVQLVQSGAEVKKPGSSVKVSCKASGGTLSHYGVSWVRQAPGQGLEWMGNIIPGIGTANYAQKFQGRVTITADESTSTAYMELSSLRSEDTAVYYCARSGGTKYGMLDVWGQGTMVTVSSASTKGPSVFPLAPSSKSTSGGTAALGCLVKDYFPEPVTVSWNSGALTSGVHTFPAVLQSSGLYSLSSVVTVPSSSLGTQTYICNVNHKPSNTKVDKRVEPKSCDKTHTCPPCPAPEAAGGPSVFLFPPKPKDTLMISRTPEVTCVVVSVSHEDPEVKFNWYVDGVEVHNAKTKPREEQYNSTYRVVSVLTVLHQDWLNGKEYKCKVSNKALPAPIEKTISKAKGQPREPQVYVLPPSREEMTKNQVSLLCLVKGFYPSDIAVEWESNGQPENNYLTWPPVLDSDGSFFLYSKLTVDKSRWQQGNVFSCSVMHEALHNHYTQKSLSLSPGGGSGGSEVQLLESGGGLVQPGGSLRLSCADSGFTFSSYAMNWVRQAPGKGLEWVSGISGSGGHTYYADSVKGRFTVSRDNSKNTLYLQMNSLRAEDTAVYYCAREGYDSSGYNPFDYWGQGTQVTVSSGTEGKSSGSGSESKSTSYELTQPPSVSVSPGQTASITCSGDKLGDKYACWYQQKPGQSPVLVIYQDSKRPSGIPERFSGSNSGNTATLTISGTQAMDEADYYCQAWDSSTVVFGGGTKLTVL

SEQ ID NO: 176 - protein, 215 aa, Artificial Sequence; identical to SEQ ID NO: 14
  BBBB969 LC

SEQ ID NO: 177 - protein, 449 aa, Artificial Sequence; identical to SEQ ID NO: 15
  BBBB969 HC2

SEQ ID NO: 178 - protein, 697 aa, Artificial Sequence
  BBBB1048 HC1
EVQLVESGGGLVKPGGSLRLSCAASGFTFSSYAMSWVRQAPGKGLEWVASISKGGNTYYPDSVKGRFTISRDNAKNSLYLQMNSLRAEDTAVYYCARGWGDYGWFAYWGQVTLVTVSSASTKGPSVFPLAPSSKSTSGGTAALGCLVKDYFPEPVTVSWNSGALTSGVHTFPAVLQSSGLYSLSSVVTVPSSSLGTQTYICNVNHKPSNTKVDKKVEPKSCDKTHTCPPCPAPEAAGGPSVFLFPPKPKDTLYITREPEVTCVVVSVSHEDPEVKFNWYVDGVEVHNAKTKPREEQYNSTYRVVSVLTVLHQDWLNGKEYKCKVSNKALPAPIEKTISKAKGQPREPQVYVYPPSREEMTKNQVSLTCLVKGFYPSDIAVEWESNGQPENNYKTTPPVLDSDGSFALVSKLTVDKSRWQQGNVFSCSVMHEALHNHYTQKSLSLSPGGGAGGAEVQLLESGGGLVQPGGSLRLSCADSGFTFSSYAMNWVRQAPGKGLEWVSGISGSGGHTYYADSVKGRFTVSRDNSKNTLYLQMNSLRAEDTAVYYCAREGYDSSGYNPFDYWGQGTQVTVSSGTEGKSSGSGSESKSTSYELTQPPSVSVSPGQTASITCSGDKLGDKYACWYQQKPGQSPVLVIYQDSKRPSGIPERFSGSNSGNTATLTISGTQAMDEADYYCQAWDSSTVVFGGGTKLTVL

SEQ ID NO: 179 - protein, 214 aa, Artificial Sequence; identical to SEQ ID NO: 17
  BBBB1048 LC

SEQ ID NO: 180 - protein, 447 aa, Artificial Sequence; identical to SEQ ID NO: 46
  BBBB1048 HC2

SEQ ID NO: 181 - protein, 697 aa, Artificial Sequence
  BBBB1046 HC1
EVQLVESGGGLVKPGGSLRLSCAASGFTFSSYAMSWVRQAPGKGLEWVASISKGGNTYYPDSVKGRFTISRDNAKNSLYLQMNSLRAEDTAVYYCARGWGDYGWFAYWGQVTLVTVSSASTKGPSVFPLAPSSKSTSGGTAALGCLVKDYFPEPVTVSWNSGALTSGVHTFPAVLQSSGLYSLSSVVTVPSSSLGTQTYICNVNHKPSNTKVDKKVEPKSCDKTHTCPPCPAPELLGGPSVFLFPPKPKDTLMISRTPEVTCVVVDVSHEDPEVKFNWYVDGVEVHNAKTKPREEQYNSTYRVVSVLTVLHQDWLNGKEYKCKVSNKALPAPIEKTISKAKGQPREPQVYVYPPSREEMTKNQVSLTCLVKGFYPSDIAVEWESNGQPENNYKTTPPVLDSDGSFALVSKLTVDKSRWQQGNVFSCSVMHEALHNHYTQKSLSLSPGGGAGGAEVQLLESGGGLVQPGGSLRLSCADSGFTFSSYAMNWVRQAPGKGLEWVSGISGSGGHTYYADSVKGRFTVSRDNSKNTLYLQMNSLRAEDTAVYYCAREGYDSSGYNPFDYWGQGTQVTVSSGTEGKSSGSGSESKSTSYELTQPPSVSVSPGQTASITCSGDKLGDKYACWYQQKPGQSPVLVIYQDSKRPSGIPERFSGSNSGNTATLTISGTQAMDEADYYCQAWDSSTVVFGGGTKLTVL

SEQ ID NO: 182 - protein, 214 aa, Artificial Sequence; identical to SEQ ID NO: 17
  BBBB1046 LC

SEQ ID NO: 183 - protein, 447 aa, Artificial Sequence; identical to SEQ ID NO: 18
  BBBB1046 HC2

SEQ ID NO: 184 - protein, 695 aa, Artificial Sequence
  BBBB1088 HC1
QVQLVQSGAEVKKPGASVKVSCKASGHVFTSYDMYWVRQAPGQGLEWIGYIDSDSGDTSYNQKFKGRVTLTVDTSTSTVYMELSSLRSEDTAVYYCAYYRYAMDYWGQGTLVTVSSASTKGPSVFPLAPSSKSTSGGTAALGCLVKDYFPEPVTVSWNSGALTSGVHTFPAVLQSSGLYSLSSVVTVPSSSLGTQTYICNVNHKPSNTKVDKKVEPKSCDKTHTCPPCPAPEAAGGPSVFLFPPKPKDTLYITREPEVTCVVVSVSHEDPEVKFNWYVDGVEVHNAKTKPREEQYNSTYRVVSVLTVLHQDWLNGKEYKCKVSNKALPAPIEKTISKAKGQPREPQVYVYPPSREEMTKNQVSLTCLVKGFYPSDIAVEWESNGQPENNYKTTPPVLDSDGSFALVSKLTVDKSRWQQGNVFSCSVMHEALHNHYTQKSLSLSPGGGAGGAEVQLLESGGGLVQPGGSLRLSCADSGFTFSSYAMNWVRQAPGKGLEWVSGISGSGGHTYYADSVKGRFTVSRDNSKNTLYLQMNSLRAEDTAVYYCAREGYDSSGYNPFDYWGQGTQVTVSSGTEGKSSGSGSESKSTSYELTQPPSVSVSPGQTASITCSGDKLGDKYACWYQQKPGQSPVLVIYQDSKRPSGIPERFSGSNSGNTATLTISGTQAMDEADYYCQAWDSSTVVFGGGTKLTVL

SEQ ID NO: 185 - protein, 219 aa, Artificial Sequence; identical to SEQ ID NO: 23
  BBBB1088 LC

SEQ ID NO: 186 - protein, 445 aa, Artificial Sequence; identical to SEQ ID NO: 24
  BBBB1088 HC2

SEQ ID NO: 187 - protein, 696 aa, Artificial Sequence
  BBBB1221 HC1
QITLKESGPTLVKPTQTLTLTCTFSGFSLSTSGMGVSWIRQPPGKALEWLAHIYWDDDKRYNPSLKSRLTITKDTSKNQVVLTMTNMDPVDTATYYCARLYGFTYGFAYWGQGTLVTVSSASTKGPSVFPLAPCSRSTSESTAALGCLVKDYFPEPVTVSWNSGALTSGVHTFPAVLQSSGLYSLSSVVTVPSSSLGTKTYTCNVDHKPSNTKVDKRVESKYGPPCPPCPAPEAAGGPSVFLFPPKPKDTLMISRTPEVTCVVVDVSQEDPEVQFNWYVDGVEVHNAKTKPREEQFNSTYRVVSVLTVLHQDWLNGKEYKCKVSNKGLPSSIEKTISKAKGQPREPQVYVLPPSQEEMTKNQVSLLCLVKGFYPSDIAVEWESNGQPENNYLTWPPVLDSDGSFFLYSRLTVDKSRWQEGNVFSCSVMHEALHNHYTQKSLSLSLGGGSGGSEVQLLESGGGLVQPGGSLRLSCADSGFTFSSYAMNWVRQAPGKGLEWVSGISGSGGHTYYADSVKGRFTVSRDNSKNTLYLQMNSLRAEDTAVYYCAREGYDSSGYNPFDYWGQGTQVTVSSGTEGKSSGSGSESKSTSYELTQPPSVSVSPGQTASITCSGDKLGDKYACWYQQKPGQSPVLVIYQDSKRPSGIPERFSGSNSGNTATLTISGTQAMDEADYYCQAWDSSTVVFGGGTKLTVL

SEQ ID NO: 188 - protein, 218 aa, Artificial Sequence; identical to SEQ ID NO: 11
  BBBB1221 LC

SEQ ID NO: 189 - protein, 446 aa, Artificial Sequence; identical to SEQ ID NO: 27
  BBBB1221 HC2

SEQ ID NO: 190 - protein, 247 aa, Artificial Sequence
  TfR8
QLRLQESGPGLVKPSETLSLTCTVSGGSISSTSYYWGWIRQPPGKGLGWIGSIYYSGNTYYNPSLKSRVTISVDTSKNQFSLTLSSVTAADTAVYYCARHDWYGGSYGWFDPWGQGTLVAVSSGTEGKSSGSGSESKSTSSELTQDPAVSVALGQTVRITCQGDSLRSYYASWYQQKPGQAPVLVIYAKNNRPSGIPDRFSGSSSGNTASLTITGAQAEDEADYYCNSRDSSGNHMVFGGGTTLTVL

SEQ ID NO: 191 - protein, 10 aa, Artificial Sequence
  TfR8 HCDR1
GGSISSTSYY

SEQ ID NO: 192 - protein, 7 aa, Artificial Sequence
  TfR8 HCDR2
IYYSGNT

SEQ ID NO: 193 - protein, 15 aa, Artificial Sequence
  TfR8 HCDR3
ARHDWYGGSYGWFDP

SEQ ID NO: 194 - protein, 6 aa, Artificial Sequence
  TfR8 LCDR1
SLRSYY

SEQ ID NO: 195 - protein, 7 aa, Artificial Sequence
  TfR8 LCDR2
AKNNRPS

SEQ ID NO: 196 - protein, 11 aa, Artificial Sequence
  TfR8 LCDR3
NSRDSSGNHMV

SEQ ID NO: 197 - protein, 702 aa, Artificial Sequence
  BBBB556 HC1
QITLKESGPTLVKPTQTLTLTCTFSGFSLSTSGMGVSWIRQPPGKALEWLAHIYWDDDKRYNPSLKSRLTITKDTSKNQVVLTMTNMDPVDTATYYCARLYGFTYGFAYWGQGTLVTVSSASTKGPSVFPLAPSSKSTSGGTAALGCLVKDYFPEPVTVSWNSGALTSGVHTFPAVLQSSGLYSLSSVVTVPSSSLGTQTYICNVNHKPSNTKVDKRVEPKSCDKTHTCPPCPAPEAAGGPSVFLFPPKPKDTLMISRTPEVTCVVVSVSHEDPEVKFNWYVDGVEVHNAKTKPREEQYNSTYRVVSVLTVLHQDWLNGKEYKCKVSNKALPAPIEKTISKAKGQPREPQVYVLPPSREEMTKNQVSLLCLVKGFYPSDIAVEWESNGQPENNYLTWPPVLDSDGSFFLYSKLTVDKSRWQQGNVFSCSVMHEALHNHYTQKSLSLSPGGGSGGSQLRLQESGPGLVKPSETLSLTCTVSGGSISSTSYYWGWIRQPPGKGLGWIGSIYYSGNTYYNPSLKSRVTISVDTSKNQFSLTLSSVTAADTAVYYCARHDWYGGSYGWFDPWGQGTLVAVSSGTEGKSSGSGSESKSTSSELTQDPAVSVALGQTVRITCQGDSLRSYYASWYQQKPGQAPVLVIYAKNNRPSGIPDRFSGSSSGNTASLTITGAQAEDEADYYCNSRDSSGNHMVFGGGTTLTVL

SEQ ID NO: 198 - protein, 218 aa, Artificial Sequence; identical to SEQ ID NO: 11
  BBBB556 LC

SEQ ID NO: 199 - protein, 449 aa, Artificial Sequence; identical to SEQ ID NO: 12
  BBBB556 HC2

SEQ ID NO: 200 - protein, 702 aa, Artificial Sequence
  BBBB993 HC1
QITLKESGPTLVKPTQTLTLTCTFSGFSLSTSGMGVSWIRQPPGKALEWLAHIYWDDDKRYNPSLKSRLTITKDTSKNQVVLTMTNMDPVDTATYYCARLYGFTYGFAYWGQGTLVTVSSASTKGPSVFPLAPSSKSTSGGTAALGCLVKDYFPEPVTVSWNSGALTSGVHTFPAVLQSSGLYSLSSVVTVPSSSLGTQTYICNVNHKPSNTKVDKKVEPKSCDKTHTCPPCPAPELLGGPSVFLFPPKPKDTLMISRTPEVTCVVVDVSHEDPEVKFNWYVDGVEVHNAKTKPREEQYNSTYRVVSVLTVLHQDWLNGKEYKCKVSNKALPAPIEKTISKAKGQPREPQVYVYPPSRDELTKNQVSLTCLVKGFYPSDIAVEWESNGQPENNYKTTPPVLDSDGSFALVSKLTVDKSRWQQGNVFSCSVMHEALHNHYTQKSLSLSPGGGSGGSQLRLQESGPGLVKPSETLSLTCTVSGGSISSTSYYWGWIRQPPGKGLGWIGSIYYSGNTYYNPSLKSRVTISVDTSKNQFSLTLSSVTAADTAVYYCARHDWYGGSYGWFDPWGQGTLVAVSSGTEGKSSGSGSESKSTSSELTQDPAVSVALGQTVRITCQGDSLRSYYASWYQQKPGQAPVLVIYAKNNRPSGIPDRFSGSSSGNTASLTITGAQAEDEADYYCNSRDSSGNHMVFGGGTTLTVL

SEQ ID NO: 201 - protein, 218 aa, Artificial Sequence; identical to SEQ ID NO: 11
  BBBB993 LC

SEQ ID NO: 202 - protein, 449 aa, Artificial Sequence; identical to SEQ ID NO: 68
  BBBB993 HC2

SEQ ID NO: 203 - protein, 702 aa, Artificial Sequence
  BBBB983 HC1
QVQLVQSGAEVKKPGSSVKVSCKASGGTLSHYGVSWVRQAPGQGLEWMGNIIPGIGTANYAQKFQGRVTITADESTSTAYMELSSLRSEDTAVYYCARSGGTKYGMLDVWGQGTMVTVSSASTKGPSVFPLAPSSKSTSGGTAALGCLVKDYFPEPVTVSWNSGALTSGVHTFPAVLQSSGLYSLSSVVTVPSSSLGTQTYICNVNHKPSNTKVDKRVEPKSCDKTHTCPPCPAPEAAGGPSVFLFPPKPKDTLMISRTPEVTCVVVSVSHEDPEVKFNWYVDGVEVHNAKTKPREEQYNSTYRVVSVLTVLHQDWLNGKEYKCKVSNKALPAPIEKTISKAKGQPREPQVYVLPPSREEMTKNQVSLLCLVKGFYPSDIAVEWESNGQPENNYLTWPPVLDSDGSFFLYSKLTVDKSRWQQGNVFSCSVMHEALHNHYTQKSLSLSPGGGSGGSQLRLQESGPGLVKPSETLSLTCTVSGGSISSTSYYWGWIRQPPGKGLGWIGSIYYSGNTYYNPSLKSRVTISVDTSKNQFSLTLSSVTAADTAVYYCARHDWYGGSYGWFDPWGQGTLVAVSSGTEGKSSGSGSESKSTSSELTQDPAVSVALGQTVRITCQGDSLRSYYASWYQQKPGQAPVLVIYAKNNRPSGIPDRFSGSSSGNTASLTITGAQAEDEADYYCNSRDSSGNHMVFGGGTTLTVL

SEQ ID NO: 204 - protein, 215 aa, Artificial Sequence; identical to SEQ ID NO: 14
  BBBB983 LC

SEQ ID NO: 205 - protein, 449 aa, Artificial Sequence; identical to SEQ ID NO: 15
  BBBB983 HC2

SEQ ID NO: 206 - protein, 700 aa, Artificial Sequence
  BBBB1051 HC1
EVQLVESGGGLVKPGGSLRLSCAASGFTFSSYAMSWVRQAPGKGLEWVASISKGGNTYYPDSVKGRFTISRDNAKNSLYLQMNSLRAEDTAVYYCARGWGDYGWFAYWGQVTLVTVSSASTKGPSVFPLAPSSKSTSGGTAALGCLVKDYFPEPVTVSWNSGALTSGVHTFPAVLQSSGLYSLSSVVTVPSSSLGTQTYICNVNHKPSNTKVDKKVEPKSCDKTHTCPPCPAPEAAGGPSVFLFPPKPKDTLYITREPEVTCVVVSVSHEDPEVKFNWYVDGVEVHNAKTKPREEQYNSTYRVVSVLTVLHQDWLNGKEYKCKVSNKALPAPIEKTISKAKGQPREPQVYVYPPSREEMTKNQVSLTCLVKGFYPSDIAVEWESNGQPENNYKTTPPVLDSDGSFALVSKLTVDKSRWQQGNVFSCSVMHEALHNHYTQKSLSLSPGGGAGGAQLRLQESGPGLVKPSETLSLTCTVSGGSISSTSYYWGWIRQPPGKGLGWIGSIYYSGNTYYNPSLKSRVTISVDTSKNQFSLTLSSVTAADTAVYYCARHDWYGGSYGWFDPWGQGTLVAVSSGTEGKSSGSGSESKSTSSELTQDPAVSVALGQTVRITCQGDSLRSYYASWYQQKPGQAPVLVIYAKNNRPSGIPDRFSGSSSGNTASLTITGAQAEDEADYYCNSRDSSGNHMVFGGGTTLTVL

SEQ ID NO: 207 - protein, 214 aa, Artificial Sequence; identical to SEQ ID NO: 17
  BBBB1051 LC

SEQ ID NO: 208 - protein, 447 aa, Artificial Sequence; identical to SEQ ID NO: 46
  BBBB1051 HC2

SEQ ID NO: 209 - protein, 700 aa, Artificial Sequence
  BBBB1049 HC1
EVQLVESGGGLVKPGGSLRLSCAASGFTFSSYAMSWVRQAPGKGLEWVASISKGGNTYYPDSVKGRFTISRDNAKNSLYLQMNSLRAEDTAVYYCARGWGDYGWFAYWGQVTLVTVSSASTKGPSVFPLAPSSKSTSGGTAALGCLVKDYFPEPVTVSWNSGALTSGVHTFPAVLQSSGLYSLSSVVTVPSSSLGTQTYICNVNHKPSNTKVDKKVEPKSCDKTHTCPPCPAPELLGGPSVFLFPPKPKDTLMISRTPEVTCVVVDVSHEDPEVKFNWYVDGVEVHNAKTKPREEQYNSTYRVVSVLTVLHQDWLNGKEYKCKVSNKALPAPIEKTISKAKGQPREPQVYVYPPSREEMTKNQVSLTCLVKGFYPSDIAVEWESNGQPENNYKTTPPVLDSDGSFALVSKLTVDKSRWQQGNVFSCSVMHEALHNHYTQKSLSLSPGGGAGGAQLRLQESGPGLVKPSETLSLTCTVSGGSISSTSYYWGWIRQPPGKGLGWIGSIYYSGNTYYNPSLKSRVTISVDTSKNQFSLTLSSVTAADTAVYYCARHDWYGGSYGWFDPWGQGTLVAVSSGTEGKSSGSGSESKSTSSELTQDPAVSVALGQTVRITCQGDSLRSYYASWYQQKPGQAPVLVIYAKNNRPSGIPDRFSGSSSGNTASLTITGAQAEDEADYYCNSRDSSGNHMVFGGGTTLTVL

SEQ ID NO: 210 - protein, 214 aa, Artificial Sequence; identical to SEQ ID NO: 17
  BBBB1049 LC

SEQ ID NO: 211 - protein, 447 aa, Artificial Sequence; identical to SEQ ID NO: 18
  BBBB1049 HC2

SEQ ID NO: 212 - protein, 698 aa, Artificial Sequence
  BBBB1091 HC1
QVQLVQSGAEVKKPGASVKVSCKASGHVFTSYDMYWVRQAPGQGLEWIGYIDSDSGDTSYNQKFKGRVTLTVDTSTSTVYMELSSLRSEDTAVYYCAYYRYAMDYWGQGTLVTVSSASTKGPSVFPLAPSSKSTSGGTAALGCLVKDYFPEPVTVSWNSGALTSGVHTFPAVLQSSGLYSLSSVVTVPSSSLGTQTYICNVNHKPSNTKVDKKVEPKSCDKTHTCPPCPAPEAAGGPSVFLFPPKPKDTLYITREPEVTCVVVSVSHEDPEVKFNWYVDGVEVHNAKTKPREEQYNSTYRVVSVLTVLHQDWLNGKEYKCKVSNKALPAPIEKTISKAKGQPREPQVYVYPPSREEMTKNQVSLTCLVKGFYPSDIAVEWESNGQPENNYKTTPPVLDSDGSFALVSKLTVDKSRWQQGNVFSCSVMHEALHNHYTQKSLSLSPGGGAGGAQLRLQESGPGLVKPSETLSLTCTVSGGSISSTSYYWGWIRQPPGKGLGWIGSIYYSGNTYYNPSLKSRVTISVDTSKNQFSLTLSSVTAADTAVYYCARHDWYGGSYGWFDPWGQGTLVAVSSGTEGKSSGSGSESKSTSSELTQDPAVSVALGQTVRITCQGDSLRSYYASWYQQKPGQAPVLVIYAKNNRPSGIPDRFSGSSSGNTASLTITGAQAEDEADYYCNSRDSSGNHMVFGGGTTLTVL

SEQ ID NO: 213 - protein, 219 aa, Artificial Sequence; identical to SEQ ID NO: 23
  BBBB1091 LC

SEQ ID NO: 214 - protein, 445 aa, Artificial Sequence; identical to SEQ ID NO: 24
  BBBB1091 HC2

SEQ ID NO: 215 - protein, 698 aa, Artificial Sequence
  BBBB1222 HC1
QITLKESGPTLVKPTQTLTLTCTFSGFSLSTSGMGVSWIRQPPGKALEWLAHIYWDDDKRYNPSLKSRLTITKDTSKNQVVLTMTNMDPVDTATYYCARLYGFTYGFAYWGQGTLVTVSSASTKGPSVFPLAPCSRSTSESTAALGCLVKDYFPEPVTVSWNSGALTSGVHTFPAVLQSSGLYSLSSVVTVPSSSLGTKTYTCNVDHKPSNTKVDKRVESKYGPPCPPCPAPEAAGGPSVFLFPPKPKDTLMISRTPEVTCVVVDVSQEDPEVQFNWYVDGVEVHNAKTKPREEQFNSTYRVVSVLTVLHQDWLNGKEYKCKVSNKGLPSSIEKTISKAKGQPREPQVYVLPPSQEEMTKNQVSLLCLVKGFYPSDIAVEWESNGQPENNYLTWPPVLDSDGSFFLYSRLTVDKSRWQEGNVFSCSVMHEALHNHYTQKSLSLSLGGGSGGSQLRLQESGPGLVKPSETLSLTCTVSGGSISSTSYYWGWIRQPPGKGLGWIGSIYYSGNTYYNPSLKSRVTISVDTSKNQFSLTLSSVTAADTAVYYCARHDWYGGSYGWFDPWGQGTLVAVSSGTEGKSSGSGSESKSTSSELTQDPAVSVALGQTVRITCQGDSLRSYYASWYQQKPGQAPVLVIYAKNNRPSGIPDRFSGSSSGNTASLTITGAQAEDEADYYCNSRDSSGNHMVFGGGTTLTV

SEQ ID NO: 216 - protein, 218 aa, Artificial Sequence; identical to SEQ ID NO: 11
  BBBB1222 LC

SEQ ID NO: 217 - protein, 446 aa, Artificial Sequence; identical to SEQ ID NO: 27
  BBBB1222 HC2

SEQ ID NO: 218 - protein, 243 aa, Artificial Sequence
  TfR9
QVQLQQWGAGLLKPSETLSLTCAVYGGSFSGYYWTWIRQPPGKGLEWIGEFIHSGSTNYNPSLKSRVTISVDTSKNQFSLKLSSVTAADTAVYFCARGSMDSSGFYSFDFWGQGTLVTVSSGTEGKSSGSGSESKSTSYEVTQPPSVSVSPGQTASITCSGHKLGDKFACWYQQKPGQSPVLVIYQDRKRPSGIPERFSGSNSGNTATLTISGTQAMDEADYYCQTWYSSTVIFGGGTKLTVL

SEQ ID NO: 219 - protein, 8 aa, Artificial Sequence
  TfR9 HCDR1
GGSFSGYY

SEQ ID NO: 220 - protein, 7 aa, Artificial Sequence
  TfR9 HCDR2
FIHSGST

SEQ ID NO: 221 - protein, 15 aa, Artificial Sequence
  TfR9 HCDR3
ARGSMDSSGFYSFDF

SEQ ID NO: 222 - protein, 6 aa, Artificial Sequence
  TfR9 LCDR1
KLGDKF

SEQ ID NO: 223 - protein, 6 aa, Artificial Sequence
  TfR9 LCDR2
QDRKRP

SEQ ID NO: 224 - protein, 9 aa, Artificial Sequence
  TfR9 LCDR3
QTWYSSTVI

SEQ ID NO: 225 - protein, 698 aa, Artificial Sequence
  BBBB557 HC1
QITLKESGPTLVKPTQTLTLTCTFSGFSLSTSGMGVSWIRQPPGKALEWLAHIYWDDDKRYNPSLKSRLTITKDTSKNQVVLTMTNMDPVDTATYYCARLYGFTYGFAYWGQGTLVTVSSASTKGPSVFPLAPSSKSTSGGTAALGCLVKDYFPEPVTVSWNSGALTSGVHTFPAVLQSSGLYSLSSVVTVPSSSLGTQTYICNVNHKPSNTKVDKRVEPKSCDKTHTCPPCPAPEAAGGPSVFLFPPKPKDTLMISRTPEVTCVVVSVSHEDPEVKFNWYVDGVEVHNAKTKPREEQYNSTYRVVSVLTVLHQDWLNGKEYKCKVSNKALPAPIEKTISKAKGQPREPQVYVLPPSREEMTKNQVSLLCLVKGFYPSDIAVEWESNGQPENNYLTWPPVLDSDGSFFLYSKLTVDKSRWQQGNVFSCSVMHEALHNHYTQKSLSLSPGGGSGGSQVQLQQWGAGLLKPSETLSLTCAVYGGSFSGYYWTWIRQPPGKGLEWIGEFIHSGSTNYNPSLKSRVTISVDTSKNQFSLKLSSVTAADTAVYFCARGSMDSSGFYSFDFWGQGTLVTVSSGTEGKSSGSGSESKSTSYEVTQPPSVSVSPGQTASITCSGHKLGDKFACWYQQKPGQSPVLVIYQDRKRPSGIPERFSGSNSGNTATLTISGTQAMDEADYYCQTWYSSTVIFGGGTKLTVL

SEQ ID NO: 226 - protein, 218 aa, Artificial Sequence; identical to SEQ ID NO: 11
  BBBB557 LC

SEQ ID NO: 227 - protein, 449 aa, Artificial Sequence; identical to SEQ ID NO: 12
  BBBB557 HC2

SEQ ID NO: 228 - protein, 698 aa, Artificial Sequence
  BBBB970 HC1
QVQLVQSGAEVKKPGSSVKVSCKASGGTLSHYGVSWVRQAPGQGLEWMGNIIPGIGTANYAQKFQGRVTITADESTSTAYMELSSLRSEDTAVYYCARSGGTKYGMLDVWGQGTMVTVSSASTKGPSVFPLAPSSKSTSGGTAALGCLVKDYFPEPVTVSWNSGALTSGVHTFPAVLQSSGLYSLSSVVTVPSSSLGTQTYICNVNHKPSNTKVDKRVEPKSCDKTHTCPPCPAPEAAGGPSVFLFPPKPKDTLMISRTPEVTCVVVSVSHEDPEVKFNWYVDGVEVHNAKTKPREEQYNSTYRVVSVLTVLHQDWLNGKEYKCKVSNKALPAPIEKTISKAKGQPREPQVYVLPPSREEMTKNQVSLLCLVKGFYPSDIAVEWESNGQPENNYLTWPPVLDSDGSFFLYSKLTVDKSRWQQGNVFSCSVMHEALHNHYTQKSLSLSPGGGSGGSQVQLQQWGAGLLKPSETLSLTCAVYGGSFSGYYWTWIRQPPGKGLEWIGEFIHSGSTNYNPSLKSRVTISVDTSKNQFSLKLSSVTAADTAVYFCARGSMDSSGFYSFDFWGQGTLVTVSSGTEGKSSGSGSESKSTSYEVTQPPSVSVSPGQTASITCSGHKLGDKFACWYQQKPGQSPVLVIYQDRKRPSGIPERFSGSNSGNTATLTISGTQAMDEADYYCQTWYSSTVIFGGGTKLTVL

SEQ ID NO: 229 - protein, 215 aa, Artificial Sequence; identical to SEQ ID NO: 14
  BBBB970 LC

SEQ ID NO: 230 - protein, 449 aa, Artificial Sequence; identical to SEQ ID NO: 15
  BBBB970 HC2

SEQ ID NO: 231 - protein, 696 aa, Artificial Sequence
  BBBB1055 HC1
EVQLVESGGGLVKPGGSLRLSCAASGFTFSSYAMSWVRQAPGKGLEWVASISKGGNTYYPDSVKGRFTISRDNAKNSLYLQMNSLRAEDTAVYYCARGWGDYGWFAYWGQVTLVTVSSASTKGPSVFPLAPSSKSTSGGTAALGCLVKDYFPEPVTVSWNSGALTSGVHTFPAVLQSSGLYSLSSVVTVPSSSLGTQTYICNVNHKPSNTKVDKKVEPKSCDKTHTCPPCPAPEAAGGPSVFLFPPKPKDTLYITREPEVTCVVVSVSHEDPEVKFNWYVDGVEVHNAKTKPREEQYNSTYRVVSVLTVLHQDWLNGKEYKCKVSNKALPAPIEKTISKAKGQPREPQVYVYPPSREEMTKNQVSLTCLVKGFYPSDIAVEWESNGQPENNYKTTPPVLDSDGSFALVSKLTVDKSRWQQGNVFSCSVMHEALHNHYTQKSLSLSPGGGAGGAQVQLQQWGAGLLKPSETLSLTCAVYGGSFSGYYWTWIRQPPGKGLEWIGEFIHSGSTNYNPSLKSRVTISVDTSKNQFSLKLSSVTAADTAVYFCARGSMDSSGFYSFDFWGQGTLVTVSSGTEGKSSGSGSESKSTSYEVTQPPSVSVSPGQTASITCSGHKLGDKFACWYQQKPGQSPVLVIYQDRKRPSGIPERFSGSNSGNTATLTISGTQAMDEADYYCQTWYSSTVIFGGGTKLTVL

SEQ ID NO: 232 - protein, 214 aa, Artificial Sequence; identical to SEQ ID NO: 17
  BBBB1055 LC

SEQ ID NO: 233 - protein, 447 aa, Artificial Sequence; identical to SEQ ID NO: 46
  BBBB1055 HC2

SEQ ID NO: 234 - protein, 696 aa, Artificial Sequence
  BBBB1053 HC1
EVQLVESGGGLVKPGGSLRLSCAASGFTFSSYAMSWVRQAPGKGLEWVASISKGGNTYYPDSVKGRFTISRDNAKNSLYLQMNSLRAEDTAVYYCARGWGDYGWFAYWGQVTLVTVSSASTKGPSVFPLAPSSKSTSGGTAALGCLVKDYFPEPVTVSWNSGALTSGVHTFPAVLQSSGLYSLSSVVTVPSSSLGTQTYICNVNHKPSNTKVDKKVEPKSCDKTHTCPPCPAPELLGGPSVFLFPPKPKDTLMISRTPEVTCVVVDVSHEDPEVKFNWYVDGVEVHNAKTKPREEQYNSTYRVVSVLTVLHQDWLNGKEYKCKVSNKALPAPIEKTISKAKGQPREPQVYVYPPSREEMTKNQVSLTCLVKGFYPSDIAVEWESNGQPENNYKTTPPVLDSDGSFALVSKLTVDKSRWQQGNVFSCSVMHEALHNHYTQKSLSLSPGGGSGGSQVQLQQWGAGLLKPSETLSLTCAVYGGSFSGYYWTWIRQPPGKGLEWIGEFIHSGSTNYNPSLKSRVTISVDTSKNQFSLKLSSVTAADTAVYFCARGSMDSSGFYSFDFWGQGTLVTVSSGTEGKSSGSGSESKSTSYEVTQPPSVSVSPGQTASITCSGHKLGDKFACWYQQKPGQSPVLVIYQDRKRPSGIPERFSGSNSGNTATLTISGTQAMDEADYYCQTWYSSTVIFGGGTKLTVL

SEQ ID NO: 235 - protein, 214 aa, Artificial Sequence; identical to SEQ ID NO: 17
  BBBB1053 LC

SEQ ID NO: 236 - protein, 447 aa, Artificial Sequence; identical to SEQ ID NO: 18
  BBBB1053 HC2

SEQ ID NO: 237 - protein, 694 aa, Artificial Sequence
  BBBB1094 HC1
QVQLVQSGAEVKKPGASVKVSCKASGHVFTSYDMYWVRQAPGQGLEWIGYIDSDSGDTSYNQKFKGRVTLTVDTSTSTVYMELSSLRSEDTAVYYCAYYRYAMDYWGQGTLVTVSSASTKGPSVFPLAPSSKSTSGGTAALGCLVKDYFPEPVTVSWNSGALTSGVHTFPAVLQSSGLYSLSSVVTVPSSSLGTQTYICNVNHKPSNTKVDKKVEPKSCDKTHTCPPCPAPEAAGGPSVFLFPPKPKDTLYITREPEVTCVVVSVSHEDPEVKFNWYVDGVEVHNAKTKPREEQYNSTYRVVSVLTVLHQDWLNGKEYKCKVSNKALPAPIEKTISKAKGQPREPQVYVYPPSREEMTKNQVSLTCLVKGFYPSDIAVEWESNGQPENNYKTTPPVLDSDGSFALVSKLTVDKSRWQQGNVFSCSVMHEALHNHYTQKSLSLSPGGGAGGAQVQLQQWGAGLLKPSETLSLTCAVYGGSFSGYYWTWIRQPPGKGLEWIGEFIHSGSTNYNPSLKSRVTISVDTSKNQFSLKLSSVTAADTAVYFCARGSMDSSGFYSFDFWGQGTLVTVSSGTEGKSSGSGSESKSTSYEVTQPPSVSVSPGQTASITCSGHKLGDKFACWYQQKPGQSPVLVIYQDRKRPSGIPERFSGSNSGNTATLTISGTQAMDEADYYCQTWYSSTVIFGGGTKLTVL

SEQ ID NO: 238 - protein, 219 aa, Artificial Sequence; identical to SEQ ID NO: 23
  BBBB1094 LC

SEQ ID NO: 239 - protein, 445 aa, Artificial Sequence; identical to SEQ ID NO: 24
  BBBB1094 HC2

SEQ ID NO: 240 - protein, 695 aa, Artificial Sequence
  BBBB1223 HC1
QITLKESGPTLVKPTQTLTLTCTFSGFSLSTSGMGVSWIRQPPGKALEWLAHIYWDDDKRYNPSLKSRLTITKDTSKNQVVLTMTNMDPVDTATYYCARLYGFTYGFAYWGQGTLVTVSSASTKGPSVFPLAPCSRSTSESTAALGCLVKDYFPEPVTVSWNSGALTSGVHTFPAVLQSSGLYSLSSVVTVPSSSLGTKTYTCNVDHKPSNTKVDKRVESKYGPPCPPCPAPEAAGGPSVFLFPPKPKDTLMISRTPEVTCVVVDVSQEDPEVQFNWYVDGVEVHNAKTKPREEQFNSTYRVVSVLTVLHQDWLNGKEYKCKVSNKGLPSSIEKTISKAKGQPREPQVYVLPPSQEEMTKNQVSLLCLVKGFYPSDIAVEWESNGQPENNYLTWPPVLDSDGSFFLYSRLTVDKSRWQEGNVFSCSVMHEALHNHYTQKSLSLSLGGGSGGSQVQLQQWGAGLLKPSETLSLTCAVYGGSFSGYYWTWIRQPPGKGLEWIGEFIHSGSTNYNPSLKSRVTISVDTSKNQFSLKLSSVTAADTAVYFCARGSMDSSGFYSFDFWGQGTLVTVSSGTEGKSSGSGSESKSTSYEVTQPPSVSVSPGQTASITCSGHKLGDKFACWYQQKPGQSPVLVIYQDRKRPSGIPERFSGSNSGNTATLTISGTQAMDEADYYCQTWYSSTVIFGGGTKLTVL

SEQ ID NO: 241 - protein, 218 aa, Artificial Sequence; identical to SEQ ID NO: 11
  BBBB1223 LC

SEQ ID NO: 242 - protein, 446 aa, Artificial Sequence; identical to SEQ ID NO: 27
  BBBB1223 HC2

SEQ ID NO: 243 - protein, 243 aa, Artificial Sequence
  TfR10
EVQLVQSGAEVKKPGESLKISCKGSGYSFTSYWIGWVRQMPGKGLEWMGIIDPSDSYTRYSPSFQGQVTISADKSISTAYLQWSSLKASDTAMYYCARMYKGRGHLFDYWGQGTLVTVSSGTEGKSSGSGSESKSTEIVLTQSPATLSLSPGERATLSCRASQSVSKALAWYQQKPGQAPRLLIYAASNRATGIPARFSGSGSGTDFTLTISSLEPEDFAVYYCQQYYRAPYTFGQGTKVEIK

SEQ ID NO: 244 - protein, 8 aa, Artificial Sequence
  TfR10 HCDR1
GYSFTSYW

SEQ ID NO: 245 - protein, 8 aa, Artificial Sequence
  TfR10 HCDR2
IDPSDSYT

SEQ ID NO: 246 - protein, 13 aa, Artificial Sequence
  TfR10 HCDR3
ARMYKGRGHLFDY

SEQ ID NO: 247 - protein, 6 aa, Artificial Sequence
  TfR10 LCDR1
QSVSKA

SEQ ID NO: 248 - protein, 7 aa, Artificial Sequence
  TfR10 LCDR2
AASNRAT

SEQ ID NO: 249 - protein, 9 aa, Artificial Sequence
  TfR10 LCDR3
QQYYRAPYT

SEQ ID NO: 250 - protein, 698 aa, Artificial Sequence
  BBBB354 HC1
QITLKESGPTLVKPTQTLTLTCTFSGFSLSTSGMGVSWIRQPPGKALEWLAHIYWDDDKRYNPSLKSRLTITKDTSKNQVVLTMTNMDPVDTATYYCARLYGFTYGFAYWGQGTLVTVSSASTKGPSVFPLAPSSKSTSGGTAALGCLVKDYFPEPVTVSWNSGALTSGVHTFPAVLQSSGLYSLSSVVTVPSSSLGTQTYICNVNHKPSNTKVDKRVEPKSCDKTHTCPPCPAPEAAGGPSVFLFPPKPKDTLMISRTPEVTCVVVSVSHEDPEVKFNWYVDGVEVHNAKTKPREEQYNSTYRVVSVLTVLHQDWLNGKEYKCKVSNKALPAPIEKTISKAKGQPREPQVYVLPPSREEMTKNQVSLLCLVKGFYPSDIAVEWESNGQPENNYLTWPPVLDSDGSFFLYSKLTVDKSRWQQGNVFSCSVMHEALHNHYTQKSLSLSPGGGSGGSEVQLVQSGAEVKKPGESLKISCKGSGYSFTSYWIGWVRQMPGKGLEWMGIIDPSDSYTRYSPSFQGQVTISADKSISTAYLQWSSLKASDTAMYYCARMYKGRGHLFDYWGQGTLVTVSSGTEGKSSGSGSESKSTEIVLTQSPATLSLSPGERATLSCRASQSVSKALAWYQQKPGQAPRLLIYAASNRATGIPARFSGSGSGTDFTLTISSLEPEDFAVYYCQQYYRAPYTFGQGTKVEIK

SEQ ID NO: 251 - protein, 218 aa, Artificial Sequence; identical to SEQ ID NO: 11
  BBBB354 LC

SEQ ID NO: 252 - protein, 449 aa, Artificial Sequence; identical to SEQ ID NO: 12
  BBBB354 HC2

SEQ ID NO: 253 - protein, 698 aa, Artificial Sequence
  BBBB932 HC1
QITLKESGPTLVKPTQTLTLTCTFSGFSLSTSGMGVSWIRQPPGKALEWLAHIYWDDDKRYNPSLKSRLTITKDTSKNQVVLTMTNMDPVDTATYYCARLYGFTYGFAYWGQGTLVTVSSASTKGPSVFPLAPSSKSTSGGTAALGCLVKDYFPEPVTVSWNSGALTSGVHTFPAVLQSSGLYSLSSVVTVPSSSLGTQTYICNVNHKPSNTKVDKKVEPKSCDKTHTCPPCPAPELLGGPSVFLFPPKPKDTLMISRTPEVTCVVVDVSHEDPEVKFNWYVDGVEVHNAKTKPREEQYNSTYRVVSVLTVLHQDWLNGKEYKCKVSNKALPAPIEKTISKAKGQPREPQVYVYPPSRDELTKNQVSLTCLVKGFYPSDIAVEWESNGQPENNYKTTPPVLDSDGSFALVSKLTVDKSRWQQGNVFSCSVMHEALHNHYTQKSLSLSPGGGSGGSEVQLVQSGAEVKKPGESLKISCKGSGYSFTSYWIGWVRQMPGKGLEWMGIIDPSDSYTRYSPSFQGQVTISADKSISTAYLQWSSLKASDTAMYYCARMYKGRGHLFDYWGQGTLVTVSSGTEGKSSGSGSESKSTEIVLTQSPATLSLSPGERATLSCRASQSVSKALAWYQQKPGQAPRLLIYAASNRATGIPARFSGSGSGTDFTLTISSLEPEDFAVYYCQQYYRAPYTFGQGTKVEIK

SEQ ID NO: 254 - protein, 218 aa, Artificial Sequence; identical to SEQ ID NO: 11
  BBBB932 LC

SEQ ID NO: 255 - protein, 449 aa, Artificial Sequence; identical to SEQ ID NO: 68
  BBBB932 HC2

SEQ ID NO: 256 - protein, 698 aa, Artificial Sequence
  BBBB383 HC1
QVQLVQSGAEVKKPGSSVKVSCKASGGTLSHYGVSWVRQAPGQGLEWMGNIIPGIGTANYAQKFQGRVTITADESTSTAYMELSSLRSEDTAVYYCARSGGTKYGMLDVWGQGTMVTVSSASTKGPSVFPLAPSSKSTSGGTAALGCLVKDYFPEPVTVSWNSGALTSGVHTFPAVLQSSGLYSLSSVVTVPSSSLGTQTYICNVNHKPSNTKVDKRVEPKSCDKTHTCPPCPAPEAAGGPSVFLFPPKPKDTLMISRTPEVTCVVVSVSHEDPEVKFNWYVDGVEVHNAKTKPREEQYNSTYRVVSVLTVLHQDWLNGKEYKCKVSNKALPAPIEKTISKAKGQPREPQVYVLPPSREEMTKNQVSLLCLVKGFYPSDIAVEWESNGQPENNYLTWPPVLDSDGSFFLYSKLTVDKSRWQQGNVFSCSVMHEALHNHYTQKSLSLSPGGGSGGSEVQLVQSGAEVKKPGESLKISCKGSGYSFTSYWIGWVRQMPGKGLEWMGIIDPSDSYTRYSPSFQGQVTISADKSISTAYLQWSSLKASDTAMYYCARMYKGRGHLFDYWGQGTLVTVSSGTEGKSSGSGSESKSTEIVLTQSPATLSLSPGERATLSCRASQSVSKALAWYQQKPGQAPRLLIYAASNRATGIPARFSGSGSGTDFTLTISSLEPEDFAVYYCQQYYRAPYTFGQGTKVEIK

SEQ ID NO: 257 - protein, 215 aa, Artificial Sequence; identical to SEQ ID NO: 14
  BBBB383 LC

SEQ ID NO: 258 - protein, 449 aa, Artificial Sequence; identical to SEQ ID NO: 15
  BBBB383 HC2

SEQ ID NO: 259 - protein, 695 aa, Artificial Sequence
  BBBB1224 HC1
QITLKESGPTLVKPTQTLTLTCTFSGFSLSTSGMGVSWIRQPPGKALEWLAHIYWDDDKRYNPSLKSRLTITKDTSKNQVVLTMTNMDPVDTATYYCARLYGFTYGFAYWGQGTLVTVSSASTKGPSVFPLAPCSRSTSESTAALGCLVKDYFPEPVTVSWNSGALTSGVHTFPAVLQSSGLYSLSSVVTVPSSSLGTKTYTCNVDHKPSNTKVDKRVESKYGPPCPPCPAPEAAGGPSVFLFPPKPKDTLMISRTPEVTCVVVDVSQEDPEVQFNWYVDGVEVHNAKTKPREEQFNSTYRVVSVLTVLHQDWLNGKEYKCKVSNKGLPSSIEKTISKAKGQPREPQVYVLPPSQEEMTKNQVSLLCLVKGFYPSDIAVEWESNGQPENNYLTWPPVLDSDGSFFLYSRLTVDKSRWQEGNVFSCSVMHEALHNHYTQKSLSLSLGGGSGGSEVQLVQSGAEVKKPGESLKISCKGSGYSFTSYWIGWVRQMPGKGLEWMGIIDPSDSYTRYSPSFQGQVTISADKSISTAYLQWSSLKASDTAMYYCARMYKGRGHLFDYWGQGTLVTVSSGTEGKSSGSGSESKSTEIVLTQSPATLSLSPGERATLSCRASQSVSKALAWYQQKPGQAPRLLIYAASNRATGIPARFSGSGSGTDFTLTISSLEPEDFAVYYCQQYYRAPYTFGQGTKVEIK

SEQ ID NO: 260 - protein, 218 aa, Artificial Sequence; identical to SEQ ID NO: 11
  BBBB1224 LC

SEQ ID NO: 261 - protein, 446 aa, Artificial Sequence; identical to SEQ ID NO: 27
  BBBB1224 HC2

SEQ ID NO: 262 - protein, 243 aa, Artificial Sequence
  TfR 11 (svFc)
EVQLVQSGAEVKKPGESLKISCKGSGYSFTSYWIGWVRQMPGKGLEWMGIIDPSDSYTRYSPSFQGQVTISADKSISTAYLQWSSLKASDTAMYYCARMYKGHGHLFDYWGQGTLVTVSSGTEGKSSGSGSESKSTEIVLTQSPATLSLSPGERATLSCRASQSVSKALAWYQQKPGQAPRLLIYAASNRATGIPARFSGSGSGTDFTLTISSLEPEDFAVYYCQQYYRAPYTFGQGTKVEIK

SEQ ID NO: 263 - protein, 8 aa, Artificial Sequence
  TfR 11 HCDR1
GYSFTSYW

SEQ ID NO: 264 - protein, 8 aa, Artificial Sequence
  TfR 11 HCDR2
IDPSDSYT

SEQ ID NO: 265 - protein, 13 aa, Artificial Sequence
  TfR 11 HCDR3
ARMYKGHGHLFDY

SEQ ID NO: 266 - protein, 6 aa, Artificial Sequence
  TfR 11 LCDR1
QSVSKA

SEQ ID NO: 267 - protein, 7 aa, Artificial Sequence
  TfR 11 LCDR2
AASNRAT

SEQ ID NO: 268 - protein, 9 aa, Artificial Sequence
  TfR 11 LCDR3
QQYYRAPYT

SEQ ID NO: 269 - protein, 698 aa, Artificial Sequence
  BBBB368 HC1
QITLKESGPTLVKPTQTLTLTCTFSGFSLSTSGMGVSWIRQPPGKALEWLAHIYWDDDKRYNPSLKSRLTITKDTSKNQVVLTMTNMDPVDTATYYCARLYGFTYGFAYWGQGTLVTVSSASTKGPSVFPLAPSSKSTSGGTAALGCLVKDYFPEPVTVSWNSGALTSGVHTFPAVLQSSGLYSLSSVVTVPSSSLGTQTYICNVNHKPSNTKVDKRVEPKSCDKTHTCPPCPAPEAAGGPSVFLFPPKPKDTLMISRTPEVTCVVVSVSHEDPEVKFNWYVDGVEVHNAKTKPREEQYNSTYRVVSVLTVLHQDWLNGKEYKCKVSNKALPAPIEKTISKAKGQPREPQVYVLPPSREEMTKNQVSLLCLVKGFYPSDIAVEWESNGQPENNYLTWPPVLDSDGSFFLYSKLTVDKSRWQQGNVFSCSVMHEALHNHYTQKSLSLSPGGGSGGSEVQLVQSGAEVKKPGESLKISCKGSGYSFTSYWIGWVRQMPGKGLEWMGIIDPSDSYTRYSPSFQGQVTISADKSISTAYLQWSSLKASDTAMYYCARMYKGHGHLFDYWGQGTLVTVSSGTEGKSSGSGSESKSTEIVLTQSPATLSLSPGERATLSCRASQSVSKALAWYQQKPGQAPRLLIYAASNRATGIPARFSGSGSGTDFTLTISSLEPEDFAVYYCQQYYRAPYTFGQGTKVEIK

SEQ ID NO: 270 - protein, 218 aa, Artificial Sequence; identical to SEQ ID NO: 11
  BBBB368 LC

SEQ ID NO: 271 - protein, 449 aa, Artificial Sequence; identical to SEQ ID NO: 12
  BBBB368 HC2

SEQ ID NO: 272 - protein, 698 aa, Artificial Sequence
  BBBB934 HC1
QITLKESGPTLVKPTQTLTLTCTFSGFSLSTSGMGVSWIRQPPGKALEWLAHIYWDDDKRYNPSLKSRLTITKDTSKNQVVLTMTNMDPVDTATYYCARLYGFTYGFAYWGQGTLVTVSSASTKGPSVFPLAPSSKSTSGGTAALGCLVKDYFPEPVTVSWNSGALTSGVHTFPAVLQSSGLYSLSSVVTVPSSSLGTQTYICNVNHKPSNTKVDKKVEPKSCDKTHTCPPCPAPELLGGPSVFLFPPKPKDTLMISRTPEVTCVVVDVSHEDPEVKFNWYVDGVEVHNAKTKPREEQYNSTYRVVSVLTVLHQDWLNGKEYKCKVSNKALPAPIEKTISKAKGQPREPQVYVYPPSRDELTKNQVSLTCLVKGFYPSDIAVEWESNGQPENNYKTTPPVLDSDGSFALVSKLTVDKSRWQQGNVFSCSVMHEALHNHYTQKSLSLSPGGGSGGSEVQLVQSGAEVKKPGESLKISCKGSGYSFTSYWIGWVRQMPGKGLEWMGIIDPSDSYTRYSPSFQGQVTISADKSISTAYLQWSSLKASDTAMYYCARMYKGHGHLFDYWGQGTLVTVSSGTEGKSSGSGSESKSTEIVLTQSPATLSLSPGERATLSCRASQSVSKALAWYQQKPGQAPRLLIYAASNRATGIPARFSGSGSGTDFTLTISSLEPEDFAVYYCQQYYRAPYTFGQGTKVEIK

SEQ ID NO: 273 - protein, 218 aa, Artificial Sequence; identical to SEQ ID NO: 11
  BBBB934 LC

SEQ ID NO: 274 - protein, 449 aa, Artificial Sequence; identical to SEQ ID NO: 68
  BBBB934 HC2

SEQ ID NO: 275 - protein, 698 aa, Artificial Sequence
  BBBB426 HC1
QVQLVQSGAEVKKPGSSVKVSCKASGGTLSHYGVSWVRQAPGQGLEWMGNIIPGIGTANYAQKFQGRVTITADESTSTAYMELSSLRSEDTAVYYCARSGGTKYGMLDVWGQGTMVTVSSASTKGPSVFPLAPSSKSTSGGTAALGCLVKDYFPEPVTVSWNSGALTSGVHTFPAVLQSSGLYSLSSVVTVPSSSLGTQTYICNVNHKPSNTKVDKRVEPKSCDKTHTCPPCPAPEAAGGPSVFLFPPKPKDTLMISRTPEVTCVVVSVSHEDPEVKFNWYVDGVEVHNAKTKPREEQYNSTYRVVSVLTVLHQDWLNGKEYKCKVSNKALPAPIEKTISKAKGQPREPQVYVLPPSREEMTKNQVSLLCLVKGFYPSDIAVEWESNGQPENNYLTWPPVLDSDGSFFLYSKLTVDKSRWQQGNVFSCSVMHEALHNHYTQKSLSLSPGGGSGGSEVQLVQSGAEVKKPGESLKISCKGSGYSFTSYWIGWVRQMPGKGLEWMGIIDPSDSYTRYSPSFQGQVTISADKSISTAYLQWSSLKASDTAMYYCARMYKGHGHLFDYWGQGTLVTVSSGTEGKSSGSGSESKSTEIVLTQSPATLSLSPGERATLSCRASQSVSKALAWYQQKPGQAPRLLIYAASNRATGIPARFSGSGSGTDFTLTISSLEPEDFAVYYCQQYYRAPYTFGQGTKVEIK

SEQ ID NO: 276 - protein, 215 aa, Artificial Sequence; identical to SEQ ID NO: 14
  BBBB426 LC

SEQ ID NO: 277 - protein, 449 aa, Artificial Sequence; identical to SEQ ID NO: 15
  BBBB426 HC2

SEQ ID NO: 278 - protein, 243 aa, Artificial Sequence
  TfR 12
QVQLQQWGAGLLKPSETLSLTCAVYGGSFSGYYWTWIRQPPGKGLEWIGEFIHSGSTNYNPSLKSRVTISVDTSKNQFSLKLSSVTAADTAVYFCARGSMDSSGFYSFDFWGQGTLVTVSSGTEGKSSGSGSESKSTSYEVTQPPSVSVSPGQTASITCSGHKLGDKFASWYQQKPGQSPVLVIYQDRKRPSGIPERFSGSNSGNTATLTISGTQAMDEADYYCQTWYSSTVIFGGGTKLTVL

SEQ ID NO: 279 - protein, 8 aa, Artificial Sequence
  TfR 12 HCDR1
GGSFSGYY

SEQ ID NO: 280 - protein, 7 aa, Artificial Sequence
  TfR 12 HCDR2
FIHSGST

SEQ ID NO: 281 - protein, 15 aa, Artificial Sequence
  TfR 12 HCDR3
ARGSMDSSGFYSFDF

SEQ ID NO: 282 - protein, 6 aa, Artificial Sequence
  TfR 12 LCDR1
KLGDKF

SEQ ID NO: 283 - protein, 6 aa, Artificial Sequence
  TfR 12 LCDR2
QDRKRP

SEQ ID NO: 284 - protein, 9 aa, Artificial Sequence
  TfR 12 LCDR3
QTWYSSTVI

SEQ ID NO: 285 - protein, 696 aa, Artificial Sequence
  BBBB1136 HC1
EVQLVESGGGLVKPGGSLRLSCAASGFTFSSYAMSWVRQAPGKGLEWVASISKGGNTYYPDSVKGRFTISRDNAKNSLYLQMNSLRAEDTAVYYCARGWGDYGWFAYWGQVTLVTVSSASTKGPSVFPLAPSSKSTSGGTAALGCLVKDYFPEPVTVSWNSGALTSGVHTFPAVLQSSGLYSLSSVVTVPSSSLGTQTYICNVNHKPSNTKVDKKVEPKSCDKTHTCPPCPAPEAAGGPSVFLFPPKPKDTLYITREPEVTCVVVSVSHEDPEVKFNWYVDGVEVHNAKTKPREEQYNSTYRVVSVLTVLHQDWLNGKEYKCKVSNKALPAPIEKTISKAKGQPREPQVYVYPPSREEMTKNQVSLTCLVKGFYPSDIAVEWESNGQPENNYKTTPPVLDSDGSFALVSKLTVDKSRWQQGNVFSCSVMHEALHNHYTQKSLSLSPGGGAGGAQVQLQQWGAGLLKPSETLSLTCAVYGGSFSGYYWTWIRQPPGKGLEWIGEFIHSGSTNYNPSLKSRVTISVDTSKNQFSLKLSSVTAADTAVYFCARGSMDSSGFYSFDFWGQGTLVTVSSGTEGKSSGSGSESKSTSYEVTQPPSVSVSPGQTASITCSGHKLGDKFASWYQQKPGQSPVLVIYQDRKRPSGIPERFSGSNSGNTATLTISGTQAMDEADYYCQTWYSSTVIFGGGTKLTVL

SEQ ID NO: 286 - protein, 214 aa, Artificial Sequence; identical to SEQ ID NO: 17
  BBBB1136 LC

SEQ ID NO: 287 - protein, 447 aa, Artificial Sequence; identical to SEQ ID NO: 46
  BBBB1136 HC2

SEQ ID NO: 288 - protein, 696 aa, Artificial Sequence
  BBBB1134 HC1
EVQLVESGGGLVKPGGSLRLSCAASGFTFSSYAMSWVRQAPGKGLEWVASISKGGNTYYPDSVKGRFTISRDNAKNSLYLQMNSLRAEDTAVYYCARGWGDYGWFAYWGQVTLVTVSSASTKGPSVFPLAPSSKSTSGGTAALGCLVKDYFPEPVTVSWNSGALTSGVHTFPAVLQSSGLYSLSSVVTVPSSSLGTQTYICNVNHKPSNTKVDKKVEPKSCDKTHTCPPCPAPELLGGPSVFLFPPKPKDTLMISRTPEVTCVVVDVSHEDPEVKFNWYVDGVEVHNAKTKPREEQYNSTYRVVSVLTVLHQDWLNGKEYKCKVSNKALPAPIEKTISKAKGQPREPQVYVYPPSREEMTKNQVSLTCLVKGFYPSDIAVEWESNGQPENNYKTTPPVLDSDGSFALVSKLTVDKSRWQQGNVFSCSVMHEALHNHYTQKSLSLSPGGGAGGAQVQLQQWGAGLLKPSETLSLTCAVYGGSFSGYYWTWIRQPPGKGLEWIGEFIHSGSTNYNPSLKSRVTISVDTSKNQFSLKLSSVTAADTAVYFCARGSMDSSGFYSFDFWGQGTLVTVSSGTEGKSSGSGSESKSTSYEVTQPPSVSVSPGQTASITCSGHKLGDKFASWYQQKPGQSPVLVIYQDRKRPSGIPERFSGSNSGNTATLTISGTQAMDEADYYCQTWYSSTVIFGGGTKLTVL

SEQ ID NO: 289 - protein, 214 aa, Artificial Sequence; identical to SEQ ID NO: 17
  BBBB1134 LC

SEQ ID NO: 290 - protein, 447 aa, Artificial Sequence; identical to SEQ ID NO: 18
  BBBB1134 HC2

SEQ ID NO: 291 - protein, 244 aa, Artificial Sequence
  TfR 13
EVQLLESGGGLVQPGGSLRLSCADSGFTFSSYAMNWVRQAPGKGLEWVSGISGSGGHTYYADSVKGRFTVSRDNSKNTLYLQMNSLRAEDTAVYYCAREGYDSSGYNPFDYWGQGTQVTVSSGTEGKSSGSGSESKSTSYELTQPPSVSVSPGQTASITCSGDKLGDKYASWYQQKPGQSPVLVIYQDSKRPSGIPERFSGSNSGNTATLTISGTQAMDEADYYCQAWDSSTVVFGGGTKLTVL

SEQ ID NO: 292 - protein, 11 aa, Artificial Sequence
  TfR 13 HCDR1
GFTFSSYAMNW

SEQ ID NO: 293 - protein, 8 aa, Artificial Sequence
  TfR 13 HCDR2
ISGSGGHT

SEQ ID NO: 294 - protein, 15 aa, Artificial Sequence
  TfR 13 HCDR3
AREGYDSSGYNPFDY

SEQ ID NO: 295 - protein, 7 aa, Artificial Sequence
  TfR 13 LCDR1
KLGDKYA

SEQ ID NO: 296 - protein, 7 aa, Artificial Sequence
  TfR 13 LCDR2
QDSKRPS

SEQ ID NO: 297 - protein, 9 aa, Artificial Sequence
  TfR 13 LCDR3
QAWDSSTVV

SEQ ID NO: 298 - protein, 697 aa, Artificial Sequence
  BBBB1133 HC1
EVQLVESGGGLVKPGGSLRLSCAASGFTFSSYAMSWVRQAPGKGLEWVASISKGGNTYYPDSVKGRFTISRDNAKNSLYLQMNSLRAEDTAVYYCARGWGDYGWFAYWGQVTLVTVSSASTKGPSVFPLAPSSKSTSGGTAALGCLVKDYFPEPVTVSWNSGALTSGVHTFPAVLQSSGLYSLSSVVTVPSSSLGTQTYICNVNHKPSNTKVDKKVEPKSCDKTHTCPPCPAPEAAGGPSVFLFPPKPKDTLYITREPEVTCVVVSVSHEDPEVKFNWYVDGVEVHNAKTKPREEQYNSTYRVVSVLTVLHQDWLNGKEYKCKVSNKALPAPIEKTISKAKGQPREPQVYVYPPSREEMTKNQVSLTCLVKGFYPSDIAVEWESNGQPENNYKTTPPVLDSDGSFALVSKLTVDKSRWQQGNVFSCSVMHEALHNHYTQKSLSLSPGGGAGGAEVQLLESGGGLVQPGGSLRLSCADSGFTFSSYAMNWVRQAPGKGLEWVSGISGSGGHTYYADSVKGRFTVSRDNSKNTLYLQMNSLRAEDTAVYYCAREGYDSSGYNPFDYWGQGTQVTVSSGTEGKSSGSGSESKSTSYELTQPPSVSVSPGQTASITCSGDKLGDKYASWYQQKPGQSPVLVIYQDSKRPSGIPERFSGSNSGNTATLTISGTQAMDEADYYCQAWDSSTVVFGGGTKLTVL

SEQ ID NO: 299 - protein, 214 aa, Artificial Sequence; identical to SEQ ID NO: 17
  BBBB1133 LC

SEQ ID NO: 300 - protein, 447 aa, Artificial Sequence; identical to SEQ ID NO: 46
  BBBB1133 HC2

SEQ ID NO: 301 - protein, 697 aa, Artificial Sequence
  BBBB1131 HC1
EVQLVESGGGLVKPGGSLRLSCAASGFTFSSYAMSWVRQAPGKGLEWVASISKGGNTYYPDSVKGRFTISRDNAKNSLYLQMNSLRAEDTAVYYCARGWGDYGWFAYWGQVTLVTVSSASTKGPSVFPLAPSSKSTSGGTAALGCLVKDYFPEPVTVSWNSGALTSGVHTFPAVLQSSGLYSLSSVVTVPSSSLGTQTYICNVNHKPSNTKVDKKVEPKSCDKTHTCPPCPAPELLGGPSVFLFPPKPKDTLMISRTPEVTCVVVDVSHEDPEVKFNWYVDGVEVHNAKTKPREEQYNSTYRVVSVLTVLHQDWLNGKEYKCKVSNKALPAPIEKTISKAKGQPREPQVYVYPPSREEMTKNQVSLTCLVKGFYPSDIAVEWESNGQPENNYKTTPPVLDSDGSFALVSKLTVDKSRWQQGNVFSCSVMHEALHNHYTQKSLSLSPGGGAGGAEVQLLESGGGLVQPGGSLRLSCADSGFTFSSYAMNWVRQAPGKGLEWVSGISGSGGHTYYADSVKGRFTVSRDNSKNTLYLQMNSLRAEDTAVYYCAREGYDSSGYNPFDYWGQGTQVTVSSGTEGKSSGSGSESKSTSYELTQPPSVSVSPGQTASITCSGDKLGDKYASWYQQKPGQSPVLVIYQDSKRPSGIPERFSGSNSGNTATLTISGTQAMDEADYYCQAWDSSTVVFGGGTKLTVL

SEQ ID NO: 302 - protein, 214 aa, Artificial Sequence; identical to SEQ ID NO: 17
  BBBB1131 LC

SEQ ID NO: 303 - protein, 447 aa, Artificial Sequence; identical to SEQ ID NO: 18
  BBBB1131 HC2

SEQ ID NO: 304 - protein, 695 aa, Artificial Sequence
  BBBB1166 HC1
QVQLVQSGAEVKKPGASVKVSCKASGHVFTSYDMYWVRQAPGQGLEWIGYIDSDSGDTSYNQKFKGRVTLTVDTSTSTVYMELSSLRSEDTAVYYCAYYRYAMDYWGQGTLVTVSSASTKGPSVFPLAPSSKSTSGGTAALGCLVKDYFPEPVTVSWNSGALTSGVHTFPAVLQSSGLYSLSSVVTVPSSSLGTQTYICNVNHKPSNTKVDKKVEPKSCDKTHTCPPCPAPEAAGGPSVFLFPPKPKDTLYITREPEVTCVVVSVSHEDPEVKFNWYVDGVEVHNAKTKPREEQYNSTYRVVSVLTVLHQDWLNGKEYKCKVSNKALPAPIEKTISKAKGQPREPQVYVYPPSREEMTKNQVSLTCLVKGFYPSDIAVEWESNGQPENNYKTTPPVLDSDGSFALVSKLTVDKSRWQQGNVFSCSVMHEALHNHYTQKSLSLSPGGGAGGAEVQLLESGGGLVQPGGSLRLSCADSGFTFSSYAMNWVRQAPGKGLEWVSGISGSGGHTYYADSVKGRFTVSRDNSKNTLYLQMNSLRAEDTAVYYCAREGYDSSGYNPFDYWGQGTQVTVSSGTEGKSSGSGSESKSTSYELTQPPSVSVSPGQTASITCSGDKLGDKYASWYQQKPGQSPVLVIYQDSKRPSGIPERFSGSNSGNTATLTISGTQAMDEADYYCQAWDSSTVVFGGGTKLTVL

SEQ ID NO: 305 - protein, 219 aa, Artificial Sequence
  BBBB1166 LC
DVVMTQSPLSLPVTLGQPASISCKSSQSLLDSRAKTYLTWLQQRPGQSPRRLIYLVSKLDSGVPDRFSGSGSGTDFTLKISRVEAEDVGVYYCWQGTHFPYTFGQGTKLEIKRTVAAPSVFIFPPSDEQLKSGTASVVCLLNNFYPREAKVQWKVDNALQSGNSQESVTEQDSKDSTYSLSSTLTLSKADYEKHKVYACEVTHQGLSSPVTKSFNRGEC

SEQ ID NO: 306 - protein, 445 aa, Artificial Sequence; identical to SEQ ID NO: 24
  BBBB1166 HC2

SEQ ID NO: 307 - protein, 449 aa, Artificial Sequence; identical to SEQ ID NO: 15
  BBBB456 HC1

SEQ ID NO: 308 - protein, 215 aa, Artificial Sequence; identical to SEQ ID NO: 14
  BBBB456 LC

SEQ ID NO: 309 - protein, 449 aa, Artificial Sequence
  BBBB456 HC2
QVQLVQSGAEVKKPGSSVKVSCKASGGTLSHYGVSWVRQAPGQGLEWMGNIIPGIGTANYAQKFQGRVTITADESTSTAYMELSSLRSEDTAVYYCARSGGTKYGMLDVWGQGTMVTVSSASTKGPSVFPLAPSSKSTSGGTAALGCLVKDYFPEPVTVSWNSGALTSGVHTFPAVLQSSGLYSLSSVVTVPSSSLGTQTYICNVNHKPSNTKVDKRVEPKSCDKTHTCPPCPAPEAAGGPSVFLFPPKPKDTLMISRTPEVTCVVVSVSHEDPEVKFNWYVDGVEVHNAKTKPREEQYNSTYRVVSVLTVLHQDWLNGKEYKCKVSNKALPAPIEKTISKAKGQPREPQVYVLPPSREEMTKNQVSLLCLVKGFYPSDIAVEWESNGQPENNYLTWPPVLDSDGSFFLYSKLTVDKSRWQQGNVFSCSVMHEALHNHYTQKSLSLSPG

SEQ ID NO: 310 - protein, 448 aa, Artificial Sequence
  PT1B844 HC
EVQLVESGGGLVKPGGSLRLSCAASGFTFSSYAMSWVRQAPGKGLEWVASISKGGNTYYPDSVKGRFTISRDNAKNSLYLQMNSLRAEDTAVYYCARGWGDYGWFAYWGQVTLVTVSSASTKGPSVFPLAPSSKSTSGGTAALGCLVKDYFPEPVTVSWNSGALTSGVHTFPAVLQSSGLYSLSSVVTVPSSSLGTQTYICNVNHKPSNTKVDKKVEPKSCDKTHTCPPCPAPELLGGPSVFLFPPKPKDTLMISRTPEVTCVVVDVSHEDPEVKFNWYVDGVEVHNAKTKPREEQYNSTYRVVSVLTVLHQDWLNGKEYKCKVSNKALPAPIEKTISKAKGQPREPQVYTLPPSREEMTKNQVSLTCLVKGFYPSDIAVEWESNGQPENNYKTTPPVLDSDGSFFLYSKLTVDKSRWQQGNVFSCSVMHEALHNHYTQKSLSLSPGK

SEQ ID NO: 311 - protein, 214 aa, Artificial Sequence; identical to SEQ ID NO: 17
  PT1B844 & PT1B916 LC

SEQ ID NO: 312 - protein, 6 aa, Artificial Sequence
  Linker 1
GGSGGS

SEQ ID NO: 313 - protein, 6 aa, Artificial Sequence
  Linker 2
GGAGGA

SEQ ID NO: 314 - protein, 16 aa, Artificial Sequence
  Linker 3
GTEGKSSGSGSESKST

SEQ ID NO: 315 - protein, 448 aa, Artificial Sequence
  PT1B916 HC
EVQLVESGGGLVKPGGSLRLSCAASGFTFSSYAMSWVRQAPGKGLEWVASISKGGNTYYPDSVKGRFTISRDNAKNSLYLQMNSLRAEDTAVYYCARGWGDYGWFAYWGQVTLVTVSSASTKGPSVFPLAPSSKSTSGGTAALGCLVKDYFPEPVTVSWNSGALTSGVHTFPAVLQSSGLYSLSSVVTVPSSSLGTQTYICNVNHKPSNTKVDKKVEPKSCDKTHTCPPCPAPELLGGPSVFLFPPKPKDTLYITREPEVTCVVVDVSHEDPEVKFNWYVDGVEVHNAKTKPREEQYNSTYRVVSVLTVLHQDWLNGKEYKCKVSNKALPAPIEKTISKAKGQPREPQVYTLPPSREEMTKNQVSLTCLVKGFYPSDIAVEWESNGQPENNYKTTPPVLDSDGSFFLYSKLTVDKSRWQQGNVFSCSVMHEALHNHYTQKSLSLSPGK

SEQ ID NO: 316 - protein, 129 aa, Artificial Sequence
  TfR 14
QVQLVESGGGLVQTGGSLRLSCAASGLTFSNYAMGWFRQAPGKKREFVAHIGGSGGTWRCADSVKGRFTISRDNAKNMVYLQMNSLNTEDTAIYYCAADQRAGSYSSGWYTRSSDSLYWGQGTQVTVSS

SEQ ID NO: 317 - protein, 8 aa, Artificial Sequence
  TfR 14 HCDR1
GLTFSNYA

SEQ ID NO: 318 - protein, 8 aa, Artificial Sequence
  TfR 14 HCDR2
IGGSGGTW

SEQ ID NO: 319 - protein, 22 aa, Artificial Sequence
  TfR 14 HCDR3
AADQRAGSYSSGWYTRSSDSLY

SEQ ID NO: 320 - protein, 584 aa, Artificial Sequence
  BBBB432 HC1
QITLKESGPTLVKPTQTLTLTCTFSGFSLSTSGMGVSWIRQPPGKALEWLAHIYWDDDKRYNPSLKSRLTITKDTSKNQVVLTMTNMDPVDTATYYCARLYGFTYGFAYWGQGTLVTVSSASTKGPSVFPLAPSSKSTSGGTAALGCLVKDYFPEPVTVSWNSGALTSGVHTFPAVLQSSGLYSLSSVVTVPSSSLGTQTYICNVNHKPSNTKVDKRVEPKSCDKTHTCPPCPAPEAAGGPSVFLFPPKPKDTLMISRTPEVTCVVVSVSHEDPEVKFNWYVDGVEVHNAKTKPREEQYNSTYRVVSVLTVLHQDWLNGKEYKCKVSNKALPAPIEKTISKAKGQPREPQVYVLPPSREEMTKNQVSLLCLVKGFYPSDIAVEWESNGQPENNYLTWPPVLDSDGSFFLYSKLTVDKSRWQQGNVFSCSVMHEALHNHYTQKSLSLSPGGGSGGSQVQLVESGGGLVQTGGSLRLSCAASGLTFSNYAMGWFRQAPGKKREFVAHIGGSGGTWRCADSVKGRFTISRDNAKNMVYLQMNSLNTEDTAIYYCAADQRAGSYSSGWYTRSSDSLYWGQGTQVTVSS

SEQ ID NO: 321 - protein, 218 aa, Artificial Sequence; identical to SEQ ID NO: 11
  BBBB432 LC

SEQ ID NO: 322 - protein, 449 aa, Artificial Sequence; identical to SEQ ID NO: 12
  BBBB432 HC2

SEQ ID NO: 323 - protein, 129 aa, Artificial Sequence
  TfR 15
QVQLVESGGGLVQAGGSLRLSCAASGLTFSSYVMGWFRQAPGKEREFVAHINGDGKFRYADSVKGWFTISRDNANNMVYLQMNSLNTEDTAIYYCASDQRAGSLSSGWYSRRSYDTLYWGQGTQVTVSS

SEQ ID NO: 324 - protein, 8 aa, Artificial Sequence
  TfR 15 HCDR1
GLTFSSYV

SEQ ID NO: 325 - protein, 7 aa, Artificial Sequence
  TfR 15 HCDR2
INGDGKF

SEQ ID NO: 326 - protein, 23 aa, Artificial Sequence
  TfR 15 HCDR3
ASDQRAGSLSSGWYSRRSYDTLY

SEQ ID NO: 327 - protein, 584 aa, Artificial Sequence
  BBBB435 HC1
QITLKESGPTLVKPTQTLTLTCTFSGFSLSTSGMGVSWIRQPPGKALEWLAHIYWDDDKRYNPSLKSRLTITKDTSKNQVVLTMTNMDPVDTATYYCARLYGFTYGFAYWGQGTLVTVSSASTKGPSVFPLAPSSKSTSGGTAALGCLVKDYFPEPVTVSWNSGALTSGVHTFPAVLQSSGLYSLSSVVTVPSSSLGTQTYICNVNHKPSNTKVDKRVEPKSCDKTHTCPPCPAPEAAGGPSVFLFPPKPKDTLMISRTPEVTCVVVSVSHEDPEVKFNWYVDGVEVHNAKTKPREEQYNSTYRVVSVLTVLHQDWLNGKEYKCKVSNKALPAPIEKTISKAKGQPREPQVYVLPPSREEMTKNQVSLLCLVKGFYPSDIAVEWESNGQPENNYLTWPPVLDSDGSFFLYSKLTVDKSRWQQGNVFSCSVMHEALHNHYTQKSLSLSPGGGSGGSQVQLVESGGGLVQAGGSLRLSCAASGLTFSSYVMGWFRQAPGKEREFVAHINGDGKFRYADSVKGWFTISRDNANNMVYLQMNSLNTEDTAIYYCASDQRAGSLSSGWYSRRSYDTLYWGQGTQVTVSS

SEQ ID NO: 328 - protein, 218 aa, Artificial Sequence; identical to SEQ ID NO: 11
  BBBB435 LC

SEQ ID NO: 329 - protein, 449 aa, Artificial Sequence; identical to SEQ ID NO: 12
  BBBB435 HC2

SEQ ID NO: 330 - protein, 128 aa, Artificial Sequence
  TFR 16
QVQLVESGGGLVQPGGSLRLSCAASGFTFSSYAMGWFRQAPGKEREFVAQISWSGRWRYADSVKGRFTISRDNANNMVYLQMNSLNTEDTAIYYCVSDQRPGTLSSGWYSRSSDTLYWGQGTKVTVSS

SEQ ID NO: 331 - protein, 8 aa, Artificial Sequence
  TfR 16 HCDR1
GFTFSSYA

SEQ ID NO: 332 - protein, 7 aa, Artificial Sequence
  TfR 16 HCDR2
ISWSGRW

SEQ ID NO: 333 - protein, 22 aa, Artificial Sequence
  TfR 16 HCDR3
VSDQRPGTLSSGWYSRSSDTLY

SEQ ID NO: 334 - protein, 583 aa, Artificial Sequence
  BBBB436 HC1
QITLKESGPTLVKPTQTLTLTCTFSGFSLSTSGMGVSWIRQPPGKALEWLAHIYWDDDKRYNPSLKSRLTITKDTSKNQVVLTMTNMDPVDTATYYCARLYGFTYGFAYWGQGTLVTVSSASTKGPSVFPLAPSSKSTSGGTAALGCLVKDYFPEPVTVSWNSGALTSGVHTFPAVLQSSGLYSLSSVVTVPSSSLGTQTYICNVNHKPSNTKVDKRVEPKSCDKTHTCPPCPAPEAAGGPSVFLFPPKPKDTLMISRTPEVTCVVVSVSHEDPEVKFNWYVDGVEVHNAKTKPREEQYNSTYRVVSVLTVLHQDWLNGKEYKCKVSNKALPAPIEKTISKAKGQPREPQVYVLPPSREEMTKNQVSLLCLVKGFYPSDIAVEWESNGQPENNYLTWPPVLDSDGSFFLYSKLTVDKSRWQQGNVFSCSVMHEALHNHYTQKSLSLSPGGGSGGSQVQLVESGGGLVQPGGSLRLSCAASGFTFSSYAMGWFRQAPGKEREFVAQISWSGRWRYADSVKGRFTISRDNANNMVYLQMNSLNTEDTAIYYCVSDQRPGTLSSGWYSRSSDTLYWGQGTKVTVSS

SEQ ID NO: 335 - protein, 218 aa, Artificial Sequence; identical to SEQ ID NO: 11
  BBBB436 LC

SEQ ID NO: 336 - protein, 449 aa, Artificial Sequence; identical to SEQ ID NO: 12
  BBBB436 HC2

SEQ ID NO: 337 - protein, 115 aa, Artificial Sequence
  TfR 17
QVHLVESGGGLVQAGGSLTLSCAASVRISSANVVGWYREAPGKQRELVAQSISGGDPYYLNSVKGRFTISRDNAKNTVYLQMNSLKPEDTAVYYCNYWNEGIRYGGQGTQVTVSS

SEQ ID NO: 338 - protein, 9 aa, Artificial Sequence
  TfR 17 HCDR1
VRISSANVV

SEQ ID NO: 339 - protein, 7 aa, Artificial Sequence
  TfR 17 HCDR2
SISGGDP

SEQ ID NO: 340 - protein, 9 aa, Artificial Sequence
  TfR 17 HCDR3
NYWNEGIRY

SEQ ID NO: 341 - protein, 570 aa, Artificial Sequence
  BBBB439 HC1
QITLKESGPTLVKPTQTLTLTCTFSGFSLSTSGMGVSWIRQPPGKALEWLAHIYWDDDKRYNPSLKSRLTITKDTSKNQVVLTMTNMDPVDTATYYCARLYGFTYGFAYWGQGTLVTVSSASTKGPSVFPLAPSSKSTSGGTAALGCLVKDYFPEPVTVSWNSGALTSGVHTFPAVLQSSGLYSLSSVVTVPSSSLGTQTYICNVNHKPSNTKVDKRVEPKSCDKTHTCPPCPAPEAAGGPSVFLFPPKPKDTLMISRTPEVTCVVVSVSHEDPEVKFNWYVDGVEVHNAKTKPREEQYNSTYRVVSVLTVLHQDWLNGKEYKCKVSNKALPAPIEKTISKAKGQPREPQVYVLPPSREEMTKNQVSLLCLVKGFYPSDIAVEWESNGQPENNYLTWPPVLDSDGSFFLYSKLTVDKSRWQQGNVFSCSVMHEALHNHYTQKSLSLSPGGGSGGSQVHLVESGGGLVQAGGSLTLSCAASVRISSANVVGWYREAPGKQRELVAQSISGGDPYYLNSVKGRFTISRDNAKNTVYLQMNSLKPEDTAVYYCNYWNEGIRYGGQGTQVTVSS

SEQ ID NO: 342 - protein, 218 aa, Artificial Sequence; identical to SEQ ID NO: 11
  BBBB439 LC

SEQ ID NO: 343 - protein, 449 aa, Artificial Sequence; identical to SEQ ID NO: 12
  BBBB439 HC2

SEQ ID NO: 344 - protein, 249 aa, Artificial Sequence
  TfR 18
EVQLVESGGGLVQPGGSLRLSCAASGFTFSSYWMHWVRQAPGKGLVWVSRINNIGNSRSYADSVKGRFTISRDNAKNTLYLQMNSLSAEDTAVYYCARAGNWDRDTFDIWGQGTMVTVSSGTEGKSSGSGSESKSTDIVMTQSPDSLAVSLGERATINCKSSQSVLYSSNNKIYLAWYQQKPGQPPKLLIYWASTRESGVPDRFSGSGSGTDFTLTISSLQAEDVAVYYCQQYYSTPYTFGQGTKLEIK

SEQ ID NO: 345 - protein, 8 aa, Artificial Sequence
  TfR 18 HCDR1
GFTFSSYW

SEQ ID NO: 346 - protein, 8 aa, Artificial Sequence
  TfR 18 HCDR2
INNIGNSR

SEQ ID NO: 347 - protein, 13 aa, Artificial Sequence
  TfR 18 HCDR3
ARAGNWDRDTFDI

SEQ ID NO: 348 - protein, 12 aa, Artificial Sequence
  TfR 18 LCDR1
QSVLYSSNNKIY

SEQ ID NO: 349 - protein, 3 aa, Artificial Sequence
  TfR 18 LCDR2
WAS

SEQ ID NO: 350 - protein, 9 aa, Artificial Sequence
  TfR 18 LCDR3
QQYYSTPYT

SEQ ID NO: 351 - protein, 704 aa, Artificial Sequence
  BBBB459 HC1
QITLKESGPTLVKPTQTLTLTCTFSGFSLSTSGMGVSWIRQPPGKALEWLAHIYWDDDKRYNPSLKSRLTITKDTSKNQVVLTMTNMDPVDTATYYCARLYGFTYGFAYWGQGTLVTVSSASTKGPSVFPLAPSSKSTSGGTAALGCLVKDYFPEPVTVSWNSGALTSGVHTFPAVLQSSGLYSLSSVVTVPSSSLGTQTYICNVNHKPSNTKVDKRVEPKSCDKTHTCPPCPAPEAAGGPSVFLFPPKPKDTLMISRTPEVTCVVVSVSHEDPEVKFNWYVDGVEVHNAKTKPREEQYNSTYRVVSVLTVLHQDWLNGKEYKCKVSNKALPAPIEKTISKAKGQPREPQVYVLPPSREEMTKNQVSLLCLVKGFYPSDIAVEWESNGQPENNYLTWPPVLDSDGSFFLYSKLTVDKSRWQQGNVFSCSVMHEALHNHYTQKSLSLSPGGGSGGSEVQLVESGGGLVQPGGSLRLSCAASGFTFSSYWMHWVRQAPGKGLVWVSRINNIGNSRSYADSVKGRFTISRDNAKNTLYLQMNSLSAEDTAVYYCARAGNWDRDTFDIWGQGTMVTVSSGTEGKSSGSGSESKSTDIVMTQSPDSLAVSLGERATINCKSSQSVLYSSNNKIYLAWYQQKPGQPPKLLIYWASTRESGVPDRFSGSGSGTDFTLTISSLQAEDVAVYYCQQYYSTPYTFGQGTKLEIK

SEQ ID NO: 352 - protein, 218 aa, Artificial Sequence; identical to SEQ ID NO: 11
  BBBB459 LC

SEQ ID NO: 353 - protein, 449 aa, Artificial Sequence; identical to SEQ ID NO: 12
  BBBB459 HC2

SEQ ID NO: 354 - protein, 247 aa, Artificial Sequence
  TfR 19
EVQLVESGGGLVKPGGSLRLSCAASGFTFSRYSMNWVRQAPGKGLEWVSSISSSSTNIYYADSVKGRFTLSRDNAKNSLYLQMNSLRAEDTAVYYCARDYMWKVFDYWGQGTLVTVSSGTEGKSSGSGSESKSTDIVMTQTPLSLPVTPGEPASISCRSSQSLLDSDDGNIFLDWYLQKPGQSPQLLIYTLSYRASGVPDRFSGSGSGTDFTLKISRVEAEDVGVYYCMQRIEFPITFGQGTRLEIK

SEQ ID NO: 355 - protein, 8 aa, Artificial Sequence
  TfR 19 HCDR1
GFTFSRYS

SEQ ID NO: 356 - protein, 8 aa, Artificial Sequence
  TfR 19 HCDR2
ISSSSTNI

SEQ ID NO: 357 - protein, 11 aa, Artificial Sequence
  TfR 19 HCDR3
ARDYMWKVFDY

SEQ ID NO: 358 - protein, 12 aa, Artificial Sequence
  TfR 19 LCDR1
QSLLDSDDGNIF

SEQ ID NO: 359 - protein, 3 aa, Artificial Sequence
  TfR 19 LCDR2
TLS

SEQ ID NO: 360 - protein, 9 aa, Artificial Sequence
  TfR 19 LCDR3
MQRIEFPIT

SEQ ID NO: 361 - protein, 702 aa, Artificial Sequence
  BBBB464 HC1
QITLKESGPTLVKPTQTLTLTCTFSGFSLSTSGMGVSWIRQPPGKALEWLAHIYWDDDKRYNPSLKSRLTITKDTSKNQVVLTMTNMDPVDTATYYCARLYGFTYGFAYWGQGTLVTVSSASTKGPSVFPLAPSSKSTSGGTAALGCLVKDYFPEPVTVSWNSGALTSGVHTFPAVLQSSGLYSLSSVVTVPSSSLGTQTYICNVNHKPSNTKVDKRVEPKSCDKTHTCPPCPAPEAAGGPSVFLFPPKPKDTLMISRTPEVTCVVVSVSHEDPEVKFNWYVDGVEVHNAKTKPREEQYNSTYRVVSVLTVLHQDWLNGKEYKCKVSNKALPAPIEKTISKAKGQPREPQVYVLPPSREEMTKNQVSLLCLVKGFYPSDIAVEWESNGQPENNYLTWPPVLDSDGSFFLYSKLTVDKSRWQQGNVFSCSVMHEALHNHYTQKSLSLSPGGGSGGSEVQLVESGGGLVKPGGSLRLSCAASGFTFSRYSMNWVRQAPGKGLEWVSSISSSSTNIYYADSVKGRFTLSRDNAKNSLYLQMNSLRAEDTAVYYCARDYMWKVFDYWGQGTLVTVSSGTEGKSSGSGSESKSTDIVMTQTPLSLPVTPGEPASISCRSSQSLLDSDDGNIFLDWYLQKPGQSPQLLIYTLSYRASGVPDRFSGSGSGTDFTLKISRVEAEDVGVYYCMQRIEFPITFGQGTRLEIK

SEQ ID NO: 362 - protein, 218 aa, Artificial Sequence; identical to SEQ ID NO: 11
  BBBB464 LC

SEQ ID NO: 363 - protein, 449 aa, Artificial Sequence; identical to SEQ ID NO: 12
  BBBB464 HC2

SEQ ID NO: 364 - protein, 247 aa, Artificial Sequence
  TfR 20
EVQLVESGGGLVKPGGSLRLSCAASGFTFSRYSMNWVRQAPGKGLEWVSSISSSSTNINYADSVRGRFTISRDNAKNSLYLQMNSLRAEDTAVYYCAREYMWKVFDYWGQGTLVTVSSGTEGKSSGSGSESKSTDIVMTQTPLSLPVTPGEPASISCRSSQSLLDSDDGNIFLDWFLQKPGQSPQLLIYTVSYRASGVPDRFSGSGSGTDFTLKISRVEAEDVGVYYCMQRIEFPITFGQGTRLEIK

SEQ ID NO: 365 - protein, 8 aa, Artificial Sequence
  TfR 20 HCDR1
GFTFSRYS

SEQ ID NO: 366 - protein, 8 aa, Artificial Sequence
  TfR 20 HCDR2
ISSSSTNI

SEQ ID NO: 367 - protein, 11 aa, Artificial Sequence
  TfR 20 HCDR3
AREYMWKVFDY

SEQ ID NO: 368 - protein, 12 aa, Artificial Sequence
  TfR 20 LCDR1
QSLLDSDDGNIF

SEQ ID NO: 369 - protein, 3 aa, Artificial Sequence
  TfR 20 LCDR2
TVS

SEQ ID NO: 370 - protein, 9 aa, Artificial Sequence
  TfR 20 LCDR3
MQRIEFPIT

SEQ ID NO: 371 - protein, 702 aa, Artificial Sequence
  BBBB467 HC1
QITLKESGPTLVKPTQTLTLTCTFSGFSLSTSGMGVSWIRQPPGKALEWLAHIYWDDDKRYNPSLKSRLTITKDTSKNQVVLTMTNMDPVDTATYYCARLYGFTYGFAYWGQGTLVTVSSASTKGPSVFPLAPSSKSTSGGTAALGCLVKDYFPEPVTVSWNSGALTSGVHTFPAVLQSSGLYSLSSVVTVPSSSLGTQTYICNVNHKPSNTKVDKRVEPKSCDKTHTCPPCPAPEAAGGPSVFLFPPKPKDTLMISRTPEVTCVVVSVSHEDPEVKFNWYVDGVEVHNAKTKPREEQYNSTYRVVSVLTVLHQDWLNGKEYKCKVSNKALPAPIEKTISKAKGQPREPQVYVLPPSREEMTKNQVSLLCLVKGFYPSDIAVEWESNGQPENNYLTWPPVLDSDGSFFLYSKLTVDKSRWQQGNVFSCSVMHEALHNHYTQKSLSLSPGGGSGGSEVQLVESGGGLVKPGGSLRLSCAASGFTFSRYSMNWVRQAPGKGLEWVSSISSSSTNINYADSVRGRFTISRDNAKNSLYLQMNSLRAEDTAVYYCAREYMWKVFDYWGQGTLVTVSSGTEGKSSGSGSESKSTDIVMTQTPLSLPVTPGEPASISCRSSQSLLDSDDGNIFLDWFLQKPGQSPQLLIYTVSYRASGVPDRFSGSGSGTDFTLKISRVEAEDVGVYYCMQRIEFPITFGQGTRLEIK

SEQ ID NO: 372 - protein, 218 aa, Artificial Sequence; identical to SEQ ID NO: 11
  BBBB467 LC

SEQ ID NO: 373 - protein, 449 aa, Artificial Sequence; identical to SEQ ID NO: 12
  BBBB467 HC2

SEQ ID NO: 374 - protein, 242 aa, Artificial Sequence
  TfR 21
EVQLVESGGGLVQPGGSLRLSCAASGFTFNSYDMHWVRQVTGKGLEWVSAIDTAGDTYYPGSVKGRFTISREDAKNSLYLQMNSLRAGDTAVYYCARDRLGYYGLDVWGQGTTVTVSSGTEGKSSGSGSESKSTEIVLTQSPGTLSLSPGERATLSCRASQSVSSSYLAWYQQKPGQAPRLLIYGASSRATGIPDRVSGSGSGTDFSLTISRLEPEDFAVYYCQQYDRSPITFGGGTKVEIK

SEQ ID NO: 375 - protein, 8 aa, Artificial Sequence
  TfR 21 HCDR1
GFTFNSYD

SEQ ID NO: 376 - protein, 7 aa, Artificial Sequence
  TfR 21 HCDR2
IDTAGDT

SEQ ID NO: 377 - protein, 12 aa, Artificial Sequence
  TfR 21 HCDR3
ARDRLGYYGLDV

SEQ ID NO: 378 - protein, 7 aa, Artificial Sequence
  TfR 21 LCDR1
QSVSSSY

SEQ ID NO: 379 - protein, 3 aa, Artificial Sequence
  TfR 21 LCDR2
GAS

SEQ ID NO: 380 - protein, 9 aa, Artificial Sequence
  TfR 21 LCDR3
QQYDRSPIT

SEQ ID NO: 381 - protein, 697 aa, Artificial Sequence
  BBBB476 HC1
QITLKESGPTLVKPTQTLTLTCTFSGFSLSTSGMGVSWIRQPPGKALEWLAHIYWDDDKRYNPSLKSRLTITKDTSKNQVVLTMTNMDPVDTATYYCARLYGFTYGFAYWGQGTLVTVSSASTKGPSVFPLAPSSKSTSGGTAALGCLVKDYFPEPVTVSWNSGALTSGVHTFPAVLQSSGLYSLSSVVTVPSSSLGTQTYICNVNHKPSNTKVDKRVEPKSCDKTHTCPPCPAPEAAGGPSVFLFPPKPKDTLMISRTPEVTCVVVSVSHEDPEVKFNWYVDGVEVHNAKTKPREEQYNSTYRVVSVLTVLHQDWLNGKEYKCKVSNKALPAPIEKTISKAKGQPREPQVYVLPPSREEMTKNQVSLLCLVKGFYPSDIAVEWESNGQPENNYLTWPPVLDSDGSFFLYSKLTVDKSRWQQGNVFSCSVMHEALHNHYTQKSLSLSPGGGSGGSEVQLVESGGGLVQPGGSLRLSCAASGFTFNSYDMHWVRQVTGKGLEWVSAIDTAGDTYYPGSVKGRFTISREDAKNSLYLQMNSLRAGDTAVYYCARDRLGYYGLDVWGQGTTVTVSSGTEGKSSGSGSESKSTEIVLTQSPGTLSLSPGERATLSCRASQSVSSSYLAWYQQKPGQAPRLLIYGASSRATGIPDRVSGSGSGTDFSLTISRLEPEDFAVYYCQQYDRSPITFGGGTKVEIK

SEQ ID NO: 382 - protein, 218 aa, Artificial Sequence; identical to SEQ ID NO: 11
  BBBB476 LC

SEQ ID NO: 383 - protein, 449 aa, Artificial Sequence; identical to SEQ ID NO: 12
  BBBB476 HC2

SEQ ID NO: 384 - protein, 248 aa, Artificial Sequence
  TfR 22
EVQVVESGGGLVKPGGSLRLSCAASGLTFNNHNMNWVRQAPGKGLEWVSYISSSSSYKYYADSVKGRFTISRDNAKNSLNLQMNSLRAEDTAVYYCARDGIAAFDAFDIWGQGTMVTVSSGTEGKSSGSGSESKSTDVVMTQSPLSLPVTLGHTASISCRSSQSLVYSDGITYLYWFQQRPGQSPRRLFYKVSNRDSGVPDRFSGSGSGTDFTLTISRVEAEDVGVYYCMQGTHWPPTFGQGTKVEIK

SEQ ID NO: 385 - protein, 8 aa, Artificial Sequence
  TfR 22 HCDR1
GLTFNNHN

SEQ ID NO: 386 - protein, 8 aa, Artificial Sequence
  TfR 22 HCDR2
ISSSSSYK

SEQ ID NO: 387 - protein, 12 aa, Artificial Sequence
  TfR 22 HCDR3
ARDGIAAFDAFD

SEQ ID NO: 388 - protein, 11 aa, Artificial Sequence
  TfR 22 LCDR1
QSLVYSDGITY

SEQ ID NO: 389 - protein, 3 aa, Artificial Sequence
  TfR 22 LCDR2
KVS

SEQ ID NO: 390 - protein, 9 aa, Artificial Sequence
  TfR 22 LCDR3
MQGTHWPPT

SEQ ID NO: 391 - protein, 703 aa, Artificial Sequence
  BBBB478 HC1
QITLKESGPTLVKPTQTLTLTCTFSGFSLSTSGMGVSWIRQPPGKALEWLAHIYWDDDKRYNPSLKSRLTITKDTSKNQVVLTMTNMDPVDTATYYCARLYGFTYGFAYWGQGTLVTVSSASTKGPSVFPLAPSSKSTSGGTAALGCLVKDYFPEPVTVSWNSGALTSGVHTFPAVLQSSGLYSLSSVVTVPSSSLGTQTYICNVNHKPSNTKVDKRVEPKSCDKTHTCPPCPAPEAAGGPSVFLFPPKPKDTLMISRTPEVTCVVVSVSHEDPEVKFNWYVDGVEVHNAKTKPREEQYNSTYRVVSVLTVLHQDWLNGKEYKCKVSNKALPAPIEKTISKAKGQPREPQVYVLPPSREEMTKNQVSLLCLVKGFYPSDIAVEWESNGQPENNYLTWPPVLDSDGSFFLYSKLTVDKSRWQQGNVFSCSVMHEALHNHYTQKSLSLSPGGGSGGSEVQVVESGGGLVKPGGSLRLSCAASGLTFNNHNMNWVRQAPGKGLEWVSYISSSSSYKYYADSVKGRFTISRDNAKNSLNLQMNSLRAEDTAVYYCARDGIAAFDAFDIWGQGTMVTVSSGTEGKSSGSGSESKSTDVVMTQSPLSLPVTLGHTASISCRSSQSLVYSDGITYLYWFQQRPGQSPRRLFYKVSNRDSGVPDRFSGSGSGTDFTLTISRVEAEDVGVYYCMQGTHWPPTFGQGTKVEIK

SEQ ID NO: 392 - protein, 218 aa, Artificial Sequence; identical to SEQ ID NO: 11
  BBBB478 LC

SEQ ID NO: 393 - protein, 449 aa, Artificial Sequence; identical to SEQ ID NO: 12
  BBBB478 HC2

SEQ ID NO: 394 - protein, 237 aa, Artificial Sequence
  TfR 23
QVTLRESGPALVKPTQTLTLTCTFSGFSLSTSGMSVSWVRQPPGKALEWLALIDWRDDKFYSTSLRTRLTISQDTSKNQVVLTMTNMDPVDTATYFCAGIPGYWGQGTLVTVSSGTEGKSSGSGSESKSTDIVMTQSQKFLSTSVGDRVSVTCKASQNVATNVVWYQRKPGQSPKALIYSASFRYSEVPDRFTGGGSGTDFTLTISNVQSEDLAEYVCQQYNNYPFTFGGGTKLEIK

SEQ ID NO: 395 - protein, 10 aa, Artificial Sequence
  TfR 23 HCDR1
GFSLSTSGMS

SEQ ID NO: 396 - protein, 7 aa, Artificial Sequence
  TfR 23 HCDR2
IDWRDDK

SEQ ID NO: 397 - protein, 6 aa, Artificial Sequence
  TfR 23 HCDR3
AGIPGY

SEQ ID NO: 398 - protein, 6 aa, Artificial Sequence
  TfR 23 LCDR1
QNVATN

SEQ ID NO: 399 - protein, 3 aa, Artificial Sequence
  TfR 23 LCDR2
SAS

SEQ ID NO: 400 - protein, 9 aa, Artificial Sequence
  TfR 23 LCDR3
QQYNNYPFT

SEQ ID NO: 401 - protein, 692 aa, Artificial Sequence
  BBBB479 HC1
QITLKESGPTLVKPTQTLTLTCTFSGFSLSTSGMGVSWIRQPPGKALEWLAHIYWDDDKRYNPSLKSRLTITKDTSKNQVVLTMTNMDPVDTATYYCARLYGFTYGFAYWGQGTLVTVSSASTKGPSVFPLAPSSKSTSGGTAALGCLVKDYFPEPVTVSWNSGALTSGVHTFPAVLQSSGLYSLSSVVTVPSSSLGTQTYICNVNHKPSNTKVDKRVEPKSCDKTHTCPPCPAPEAAGGPSVFLFPPKPKDTLMISRTPEVTCVVVSVSHEDPEVKFNWYVDGVEVHNAKTKPREEQYNSTYRVVSVLTVLHQDWLNGKEYKCKVSNKALPAPIEKTISKAKGQPREPQVYVLPPSREEMTKNQVSLLCLVKGFYPSDIAVEWESNGQPENNYLTWPPVLDSDGSFFLYSKLTVDKSRWQQGNVFSCSVMHEALHNHYTQKSLSLSPGGGSGGSQVTLRESGPALVKPTQTLTLTCTFSGFSLSTSGMSVSWVRQPPGKALEWLALIDWRDDKFYSTSLRTRLTISQDTSKNQVVLTMTNMDPVDTATYFCAGIPGYWGQGTLVTVSSGTEGKSSGSGSESKSTDIVMTQSQKFLSTSVGDRVSVTCKASQNVATNVVWYQRKPGQSPKALIYSASFRYSEVPDRFTGGGSGTDFTLTISNVQSEDLAEYVCQQYNNYPFTFGGGTKLEIK

SEQ ID NO: 402 - protein, 218 aa, Artificial Sequence; identical to SEQ ID NO: 11
  BBBB479 LC

SEQ ID NO: 403 - protein, 449 aa, Artificial Sequence; identical to SEQ ID NO: 12
  BBBB479 HC2

SEQ ID NO: 404 - protein, 245 aa, Artificial Sequence
  TfR 24
QVLLVESGGGVVQPGRSLRLSCAASGFTFSTYDMHWVRQAPGKGLEWVAVIWYDGTNRYYADSVKGRFTISRDNSKNTLYLQMNSLRAEDTAVYYCARDHGYTKFSDAFDFWGQGTMVTVSSGTEGKSSGSGSESKSTDIQMTQSPSAMSASVGDSVTITCRASQGISNYLVWFQQKPGKDPKRLIYAASSLQSGVPSRFSGSGSGTEFTLTISSLQPEDFATYYCLQHNSYPLTFGGGTKVEIK

SEQ ID NO: 405 - protein, 8 aa, Artificial Sequence
  TfR 24 HCDR1
GFTFSTYD

SEQ ID NO: 406 - protein, 8 aa, Artificial Sequence
  TfR 24 HCDR2
IWYDGTNR

SEQ ID NO: 407 - protein, 15 aa, Artificial Sequence
  TfR 24 HCDR3
ARDHGYTKFSDAFDF

SEQ ID NO: 408 - protein, 6 aa, Artificial Sequence
  TfR 24 LCDR1
QGISNY

SEQ ID NO: 409 - protein, 3 aa, Artificial Sequence
  TfR 24 LCDR2
AAS

SEQ ID NO: 410 - protein, 9 aa, Artificial Sequence
  TfR 24 LCDR3
LQHNSYPLT

SEQ ID NO: 411 - protein, 700 aa, Artificial Sequence
  BBBB482 HC1
QITLKESGPTLVKPTQTLTLTCTFSGFSLSTSGMGVSWIRQPPGKALEWLAHIYWDDDKRYNPSLKSRLTITKDTSKNQVVLTMTNMDPVDTATYYCARLYGFTYGFAYWGQGTLVTVSSASTKGPSVFPLAPSSKSTSGGTAALGCLVKDYFPEPVTVSWNSGALTSGVHTFPAVLQSSGLYSLSSVVTVPSSSLGTQTYICNVNHKPSNTKVDKRVEPKSCDKTHTCPPCPAPEAAGGPSVFLFPPKPKDTLMISRTPEVTCVVVSVSHEDPEVKFNWYVDGVEVHNAKTKPREEQYNSTYRVVSVLTVLHQDWLNGKEYKCKVSNKALPAPIEKTISKAKGQPREPQVYVLPPSREEMTKNQVSLLCLVKGFYPSDIAVEWESNGQPENNYLTWPPVLDSDGSFFLYSKLTVDKSRWQQGNVFSCSVMHEALHNHYTQKSLSLSPGGGSGGSQVLLVESGGGVVQPGRSLRLSCAASGFTFSTYDMHWVRQAPGKGLEWVAVIWYDGTNRYYADSVKGRFTISRDNSKNTLYLQMNSLRAEDTAVYYCARDHGYTKFSDAFDFWGQGTMVTVSSGTEGKSSGSGSESKSTDIQMTQSPSAMSASVGDSVTITCRASQGISNYLVWFQQKPGKDPKRLIYAASSLQSGVPSRFSGSGSGTEFTLTISSLQPEDFATYYCLQHNSYPLTFGGGTKVEIK

SEQ ID NO: 412 - protein, 218 aa, Artificial Sequence; identical to SEQ ID NO: 11
  BBBB482 LC

SEQ ID NO: 413 - protein, 449 aa, Artificial Sequence; identical to SEQ ID NO: 12
  BBBB482 HC2

SEQ ID NO: 414 - protein, 243 aa, Artificial Sequence
  TfR 25
QVQLQESGPGLVKPSETLSLTCTVSGGSISAYYWLWIRQPAGKGLEWLGRIYASGTTYYNPSLKSRITMSLDTSRNQFSLRLRSVTAADTAVYYCARQETDTTGYDYFDYWGQGTLVTVSSGTEGKSSGSGSESKSTSYELTQPPSVSMSPGQTASITCSGDKLGDKFVCWYQKQPGQSPVLVIYQDNKRPSGIPERFTGSNSGNTATLTISETQAMDEADYYCQTWDRSDAVFGGGTKLTVL

SEQ ID NO: 415 - protein, 8 aa, Artificial Sequence
  TfR 25 HCDR1
GGSISAYY

SEQ ID NO: 416 - protein, 7 aa, Artificial Sequence
  TfR 25 HCDR2
IYASGTT

SEQ ID NO: 417 - protein, 15 aa, Artificial Sequence
  TfR 25 HCDR3
ARQETDTTGYDYFDY

SEQ ID NO: 418 - protein, 6 aa, Artificial Sequence
  TfR 25 LCDR1
KLGDKF

SEQ ID NO: 419 - protein, 3 aa, Artificial Sequence
  TfR 25 LCDR2
QDN

SEQ ID NO: 420 - protein, 9 aa, Artificial Sequence
  TfR 25 LCDR3
QTWDRSDAV

SEQ ID NO: 421 - protein, 698 aa, Artificial Sequence
  BBBB486 HC1
QITLKESGPTLVKPTQTLTLTCTFSGFSLSTSGMGVSWIRQPPGKALEWLAHIYWDDDKRYNPSLKSRLTITKDTSKNQVVLTMTNMDPVDTATYYCARLYGFTYGFAYWGQGTLVTVSSASTKGPSVFPLAPSSKSTSGGTAALGCLVKDYFPEPVTVSWNSGALTSGVHTFPAVLQSSGLYSLSSVVTVPSSSLGTQTYICNVNHKPSNTKVDKRVEPKSCDKTHTCPPCPAPEAAGGPSVFLFPPKPKDTLMISRTPEVTCVVVSVSHEDPEVKFNWYVDGVEVHNAKTKPREEQYNSTYRVVSVLTVLHQDWLNGKEYKCKVSNKALPAPIEKTISKAKGQPREPQVYVLPPSREEMTKNQVSLLCLVKGFYPSDIAVEWESNGQPENNYLTWPPVLDSDGSFFLYSKLTVDKSRWQQGNVFSCSVMHEALHNHYTQKSLSLSPGGGSGGSQVQLQESGPGLVKPSETLSLTCTVSGGSISAYYWLWIRQPAGKGLEWLGRIYASGTTYYNPSLKSRITMSLDTSRNQFSLRLRSVTAADTAVYYCARQETDTTGYDYFDYWGQGTLVTVSSGTEGKSSGSGSESKSTSYELTQPPSVSMSPGQTASITCSGDKLGDKFVCWYQKQPGQSPVLVIYQDNKRPSGIPERFTGSNSGNTATLTISETQAMDEADYYCQTWDRSDAVFGGGTKLTVL

SEQ ID NO: 422 - protein, 218 aa, Artificial Sequence; identical to SEQ ID NO: 11
  BBBB486 LC

SEQ ID NO: 423 - protein, 449 aa, Artificial Sequence; identical to SEQ ID NO: 12
  BBBB486 HC2

SEQ ID NO: 424 - protein, 246 aa, Artificial Sequence
  TfR 26
EVQLVESGGGLVQPGGSLRLSCVASGFTFSYYWMHWVRQAPGKGLVWVSRISSDGSSTTYADSVSGRFTISRDNAKNTLYLQMNSLRAEDTAVYYCAREQRWLKSYYYGMDVWGQGTTVTVSSGTEGKSSGSGSESKSTDIQLTQSPSFLSASVGDRVTITCRASQGINSYLGWYQQKQGKAPKLLIHAASTLQSGVPSRFSGSGSGTEFTFTISSLQPEDFASYYCQQLNSYPLTFGGGTKVENK

SEQ ID NO: 425 - protein, 8 aa, Artificial Sequence
  TfR 26 HCDR1
GFTFSYYW

SEQ ID NO: 426 - protein, 8 aa, Artificial Sequence
  TfR 26 HCDR2
ISSDGSST

SEQ ID NO: 427 - protein, 16 aa, Artificial Sequence
  TfR 26 HCDR3
AREQRWLKSYYYGMDV

SEQ ID NO: 428 - protein, 6 aa, Artificial Sequence
  TfR 26 LCDR1
QGINSY

SEQ ID NO: 429 - protein, 3 aa, Artificial Sequence
  TfR 26 LCDR2
AAS

SEQ ID NO: 430 - protein, 9 aa, Artificial Sequence
  TfR 26 LCDR3
QQLNSYPLT

SEQ ID NO: 431 - protein, 701 aa, Artificial Sequence
  BBBB500 HC1
QITLKESGPTLVKPTQTLTLTCTFSGFSLSTSGMGVSWIRQPPGKALEWLAHIYWDDDKRYNPSLKSRLTITKDTSKNQVVLTMTNMDPVDTATYYCARLYGFTYGFAYWGQGTLVTVSSASTKGPSVFPLAPSSKSTSGGTAALGCLVKDYFPEPVTVSWNSGALTSGVHTFPAVLQSSGLYSLSSVVTVPSSSLGTQTYICNVNHKPSNTKVDKRVEPKSCDKTHTCPPCPAPEAAGGPSVFLFPPKPKDTLMISRTPEVTCVVVSVSHEDPEVKFNWYVDGVEVHNAKTKPREEQYNSTYRVVSVLTVLHQDWLNGKEYKCKVSNKALPAPIEKTISKAKGQPREPQVYVLPPSREEMTKNQVSLLCLVKGFYPSDIAVEWESNGQPENNYLTWPPVLDSDGSFFLYSKLTVDKSRWQQGNVFSCSVMHEALHNHYTQKSLSLSPGGGSGGSEVQLVESGGGLVQPGGSLRLSCVASGFTFSYYWMHWVRQAPGKGLVWVSRISSDGSSTTYADSVSGRFTISRDNAKNTLYLQMNSLRAEDTAVYYCAREQRWLKSYYYGMDVWGQGTTVTVSSGTEGKSSGSGSESKSTDIQLTQSPSFLSASVGDRVTITCRASQGINSYLGWYQQKQGKAPKLLIHAASTLQSGVPSRFSGSGSGTEFTFTISSLQPEDFASYYCQQLNSYPLTFGGGTKVENK

SEQ ID NO: 432 - protein, 218 aa, Artificial Sequence; identical to SEQ ID NO: 11
  BBBB500 LC

SEQ ID NO: 433 - protein, 449 aa, Artificial Sequence; identical to SEQ ID NO: 12
  BBBB500 HC2

SEQ ID NO: 434 - protein, 243 aa, Artificial Sequence
  TfR 27
DVQLVESGGGLVKPGGSLRLSCAASAFRFSNFNMNWVRQAPGKGLEWVSSITSTGTYIYYADSLEGRFTISRDNAKNSLFLQMNSLRAEDTAVYYCARQGIPAWDAFDLWGQGTMVTVSSGTEGKSSGSGSESKSTDIQMTQSPSAMSASVGDRVTITCRASQGISNYLAWFQQKPGKVPKRLIYAASSLQSGVPSRFSGSGSGTEFTLTISSLQPEDFATYYCLQHNSYPYTFGQGTKLEIK

SEQ ID NO: 435 - protein, 8 aa, Artificial Sequence
  TfR 27 HCDR1
AFRFSNFN

SEQ ID NO: 436 - protein, 8 aa, Artificial Sequence
  TfR 27 HCDR2
ITSTGTYI

SEQ ID NO: 437 - protein, 13 aa, Artificial Sequence
  TfR 27 HCDR3
ARQGIPAWDAFDL

SEQ ID NO: 438 - protein, 6 aa, Artificial Sequence
  TfR 27 LCDR1
QGISNY

SEQ ID NO: 439 - protein, 3 aa, Artificial Sequence
  TfR 27 LCDR2
ASS

SEQ ID NO: 440 - protein, 9 aa, Artificial Sequence
  TfR 27 LCDR3
LQHNSYPYT

SEQ ID NO: 441 - protein, 698 aa, Artificial Sequence
  BBBB504 HC1
QITLKESGPTLVKPTQTLTLTCTFSGFSLSTSGMGVSWIRQPPGKALEWLAHIYWDDDKRYNPSLKSRLTITKDTSKNQVVLTMTNMDPVDTATYYCARLYGFTYGFAYWGQGTLVTVSSASTKGPSVFPLAPSSKSTSGGTAALGCLVKDYFPEPVTVSWNSGALTSGVHTFPAVLQSSGLYSLSSVVTVPSSSLGTQTYICNVNHKPSNTKVDKRVEPKSCDKTHTCPPCPAPEAAGGPSVFLFPPKPKDTLMISRTPEVTCVVVSVSHEDPEVKFNWYVDGVEVHNAKTKPREEQYNSTYRVVSVLTVLHQDWLNGKEYKCKVSNKALPAPIEKTISKAKGQPREPQVYVLPPSREEMTKNQVSLLCLVKGFYPSDIAVEWESNGQPENNYLTWPPVLDSDGSFFLYSKLTVDKSRWQQGNVFSCSVMHEALHNHYTQKSLSLSPGGGSGGSDVQLVESGGGLVKPGGSLRLSCAASAFRFSNFNMNWVRQAPGKGLEWVSSITSTGTYIYYADSLEGRFTISRDNAKNSLFLQMNSLRAEDTAVYYCARQGIPAWDAFDLWGQGTMVTVSSGTEGKSSGSGSESKSTDIQMTQSPSAMSASVGDRVTITCRASQGISNYLAWFQQKPGKVPKRLIYAASSLQSGVPSRFSGSGSGTEFTLTISSLQPEDFATYYCLQHNSYPYTFGQGTKLEIK

SEQ ID NO: 442 - protein, 218 aa, Artificial Sequence; identical to SEQ ID NO: 11
  BBBB504 LC

SEQ ID NO: 443 - protein, 449 aa, Artificial Sequence; identical to SEQ ID NO: 12
  BBBB504 HC2

SEQ ID NO: 444 - protein, 243 aa, Artificial Sequence
  TfR 28
EVQLVESGGGLVKPGGSLRLSCVASGFTFSSYNMNWVRQAPGKGLEWVSSISSSSSYIYYADSVKGRFTISRDNAKNSLYLQMNSLRAEDTAVYYCAREGISAYDALNVWGQGTMVTVSSGTEGKSSGSGSESKSTDIQMTQSPSAMSASVGDRVTITCRASQGISNFFAWFQQKPGKVPKRLIYAASSLQSGVPSRFSGSGSGTEFTLTISSLQPEDFATYYCLQHDSYPLTFGGGTKVEIK

SEQ ID NO: 445 - protein, 8 aa, Artificial Sequence
  TfR 28 HCDR1
GFTFSSYN

SEQ ID NO: 446 - protein, 8 aa, Artificial Sequence
  TfR 28 HCDR2
ISSSSSYI

SEQ ID NO: 447 - protein, 13 aa, Artificial Sequence
  TfR 28 HCDR3
AREGISAYDALNV

SEQ ID NO: 448 - protein, 6 aa, Artificial Sequence
  TfR 28 LCDR1
QGISNF

SEQ ID NO: 449 - protein, 3 aa, Artificial Sequence
  TfR 28 LCDR2
AAS

SEQ ID NO: 450 - protein, 9 aa, Artificial Sequence
  TfR 28 LCDR3
LQHDSYPLT

SEQ ID NO: 451 - protein, 698 aa, Artificial Sequence
  BBBB508 HC1
QITLKESGPTLVKPTQTLTLTCTFSGFSLSTSGMGVSWIRQPPGKALEWLAHIYWDDDKRYNPSLKSRLTITKDTSKNQVVLTMTNMDPVDTATYYCARLYGFTYGFAYWGQGTLVTVSSASTKGPSVFPLAPSSKSTSGGTAALGCLVKDYFPEPVTVSWNSGALTSGVHTFPAVLQSSGLYSLSSVVTVPSSSLGTQTYICNVNHKPSNTKVDKRVEPKSCDKTHTCPPCPAPEAAGGPSVFLFPPKPKDTLMISRTPEVTCVVVSVSHEDPEVKFNWYVDGVEVHNAKTKPREEQYNSTYRVVSVLTVLHQDWLNGKEYKCKVSNKALPAPIEKTISKAKGQPREPQVYVLPPSREEMTKNQVSLLCLVKGFYPSDIAVEWESNGQPENNYLTWPPVLDSDGSFFLYSKLTVDKSRWQQGNVFSCSVMHEALHNHYTQKSLSLSPGGGSGGSEVQLVESGGGLVKPGGSLRLSCVASGFTFSSYNMNWVRQAPGKGLEWVSSISSSSSYIYYADSVKGRFTISRDNAKNSLYLQMNSLRAEDTAVYYCAREGISAYDALNVWGQGTMVTVSSGTEGKSSGSGSESKSTDIQMTQSPSAMSASVGDRVTITCRASQGISNFFAWFQQKPGKVPKRLIYAASSLQSGVPSRFSGSGSGTEFTLTISSLQPEDFATYYCLQHDSYPLTFGGGTKVEIK

SEQ ID NO: 452 - protein, 218 aa, Artificial Sequence; identical to SEQ ID NO: 11
  BBBB508 LC

SEQ ID NO: 453 - protein, 449 aa, Artificial Sequence; identical to SEQ ID NO: 12
  BBBB508 HC2

SEQ ID NO: 454 - protein, 246 aa, Artificial Sequence; identical to SEQ ID NO: 56
  TfR 29

SEQ ID NO: 455 - protein, 8 aa, Artificial Sequence
  TfR 29 HCDR1
GFTFSSYN

SEQ ID NO: 456 - protein, 8 aa, Artificial Sequence
  TfR 29 HCDR2
ISSSSSYI

SEQ ID NO: 457 - protein, 13 aa, Artificial Sequence
  TfR 29 HCDR3
AREGISAYDALNV

SEQ ID NO: 458 - protein, 8 aa, Artificial Sequence
  TfR 29 LCDR1
SSNIGNNY

SEQ ID NO: 459 - protein, 3 aa, Artificial Sequence
  TfR 29 LCDR2
DNN

SEQ ID NO: 460 - protein, 11 aa, Artificial Sequence
  TfR 29 LCDR3
GTWDSSLSAVV

SEQ ID NO: 461 - protein, 701 aa, Artificial Sequence; identical to SEQ ID NO: 63
  BBBB509 HC1

SEQ ID NO: 462 - protein, 218 aa, Artificial Sequence; identical to SEQ ID NO: 11
  BBBB509 LC

SEQ ID NO: 463 - protein, 449 aa, Artificial Sequence; identical to SEQ ID NO: 12
  BBBB509 HC2

SEQ ID NO: 464 - protein, 245 aa, Artificial Sequence
  TfR 30
QVQLVESGGGLVKPGGSLRLSCAASGFTFSDYYMSWIRQAPGKGLECISYISSSSVTIYYADSVKGRFTISRDNAKNSLYLQMNSLRAEDTAVYYCAREDSDTSGYDPFDHWGQGTLVTVSSGTEGKSSGSGSESKSTEIVMTQSPATLSVSPGERATLSCRASQSVSSNLAWYQQKPGQAPRLLIYGASTRATGIPARFSGSGSGTEFTLTISSLQSEDFAVYYCQQYNNWPYTFGQGTKLEIK

SEQ ID NO: 465 - protein, 8 aa, Artificial Sequence
  TfR 30 HCDR1
GFTFSDYY

SEQ ID NO: 466 - protein, 8 aa, Artificial Sequence
  TfR 30 HCDR2
ISSSSVTI

SEQ ID NO: 467 - protein, 15 aa, Artificial Sequence
  TfR 30 HCDR3
AREDSDTSGYDPFDH

SEQ ID NO: 468 - protein, 6 aa, Artificial Sequence
  TfR 30 LCDR1
QSVSSN

SEQ ID NO: 469 - protein, 3 aa, Artificial Sequence
  TfR 30 LCDR2
GAS

SEQ ID NO: 470 - protein, 9 aa, Artificial Sequence
  TfR 30 LCDR3
QQYNNWPYT

SEQ ID NO: 471 - protein, 700 aa, Artificial Sequence
  BBBB522 HC1
QITLKESGPTLVKPTQTLTLTCTFSGFSLSTSGMGVSWIRQPPGKALEWLAHIYWDDDKRYNPSLKSRLTITKDTSKNQVVLTMTNMDPVDTATYYCARLYGFTYGFAYWGQGTLVTVSSASTKGPSVFPLAPSSKSTSGGTAALGCLVKDYFPEPVTVSWNSGALTSGVHTFPAVLQSSGLYSLSSVVTVPSSSLGTQTYICNVNHKPSNTKVDKRVEPKSCDKTHTCPPCPAPEAAGGPSVFLFPPKPKDTLMISRTPEVTCVVVSVSHEDPEVKFNWYVDGVEVHNAKTKPREEQYNSTYRVVSVLTVLHQDWLNGKEYKCKVSNKALPAPIEKTISKAKGQPREPQVYVLPPSREEMTKNQVSLLCLVKGFYPSDIAVEWESNGQPENNYLTWPPVLDSDGSFFLYSKLTVDKSRWQQGNVFSCSVMHEALHNHYTQKSLSLSPGGGSGGSQVQLVESGGGLVKPGGSLRLSCAASGFTFSDYYMSWIRQAPGKGLECISYISSSSVTIYYADSVKGRFTISRDNAKNSLYLQMNSLRAEDTAVYYCAREDSDTSGYDPFDHWGQGTLVTVSSGTEGKSSGSGSESKSTEIVMTQSPATLSVSPGERATLSCRASQSVSSNLAWYQQKPGQAPRLLIYGASTRATGIPARFSGSGSGTEFTLTISSLQSEDFAVYYCQQYNNWPYTFGQGTKLEIK

SEQ ID NO: 472 - protein, 218 aa, Artificial Sequence; identical to SEQ ID NO: 11
  BBBB522 LC

SEQ ID NO: 473 - protein, 449 aa, Artificial Sequence; identical to SEQ ID NO: 12
  BBBB522 HC2

SEQ ID NO: 474 - protein, 244 aa, Artificial Sequence
  TfR 31
QVQLVESGGGLVKPGGSLRLSCEASGFTLSDYDMTWIRQAPGKGLEWVSYINSGGNIISYADSVKGRFTISRDNAKNSLYLQMNSLRAEDTAVFYCARLYYDTSGYSSFDYWGQGIQVTVSSGTEGKSSGSGSESKSTSYEVTQPPSVSVSPGQTASITCSGHKLGDKFACWYQQKPGQSPVLVIYQDRKRPSGIPERFSGSNSGNTATLTISGTQAMDEADYYCQTWYSSTVIFGGGTKLTVL

SEQ ID NO: 475 - protein, 8 aa, Artificial Sequence
  TfR 31 HCDR1
GFTLSDYD

SEQ ID NO: 476 - protein, 8 aa, Artificial Sequence
  TfR 31 HCDR2
INSGGNII

SEQ ID NO: 477 - protein, 15 aa, Artificial Sequence
  TfR 31 HCDR3
ARLYYDTSGYSSFDY

SEQ ID NO: 478 - protein, 6 aa, Artificial Sequence
  TfR 31 LCDR1
KLGDKF

SEQ ID NO: 479 - protein, 3 aa, Artificial Sequence
  TfR 31 LCDR2
QDR

SEQ ID NO: 480 - protein, 9 aa, Artificial Sequence
  TfR 31 LCDR3
QTWYSSTVI

SEQ ID NO: 481 - protein, 699 aa, Artificial Sequence
  BBBB529 HC1
QITLKESGPTLVKPTQTLTLTCTFSGFSLSTSGMGVSWIRQPPGKALEWLAHIYWDDDKRYNPSLKSRLTITKDTSKNQVVLTMTNMDPVDTATYYCARLYGFTYGFAYWGQGTLVTVSSASTKGPSVFPLAPSSKSTSGGTAALGCLVKDYFPEPVTVSWNSGALTSGVHTFPAVLQSSGLYSLSSVVTVPSSSLGTQTYICNVNHKPSNTKVDKRVEPKSCDKTHTCPPCPAPEAAGGPSVFLFPPKPKDTLMISRTPEVTCVVVSVSHEDPEVKFNWYVDGVEVHNAKTKPREEQYNSTYRVVSVLTVLHQDWLNGKEYKCKVSNKALPAPIEKTISKAKGQPREPQVYVLPPSREEMTKNQVSLLCLVKGFYPSDIAVEWESNGQPENNYLTWPPVLDSDGSFFLYSKLTVDKSRWQQGNVFSCSVMHEALHNHYTQKSLSLSPGGGSGGSQVQLVESGGGLVKPGGSLRLSCEASGFTLSDYDMTWIRQAPGKGLEWVSYINSGGNIISYADSVKGRFTISRDNAKNSLYLQMNSLRAEDTAVFYCARLYYDTSGYSSFDYWGQGIQVTVSSGTEGKSSGSGSESKSTSYEVTQPPSVSVSPGQTASITCSGHKLGDKFACWYQQKPGQSPVLVIYQDRKRPSGIPERFSGSNSGNTATLTISGTQAMDEADYYCQTWYSSTVIFGGGTKLTVL

SEQ ID NO: 482 - protein, 218 aa, Artificial Sequence; identical to SEQ ID NO: 11
  BBBB529 LC

SEQ ID NO: 483 - protein, 449 aa, Artificial Sequence; identical to SEQ ID NO: 12
  BBBB529 HC2

SEQ ID NO: 484 - protein, 244 aa, Artificial Sequence
  TfR 32
EVQLLESGGGLVQPGGSLRLSCAASGFTFSSYAMSWVRQAPGKGLEWVSGISAGGGSTYYADSVKGRFTVSRGNSKNTLYLQMNSLRAEDTAVYFCAKREDDTTGYHYFDYWGQGTLVAVSSGTEGKSSGSGSESKSTSYELTQAPSVSVSPGQTASITCSGDKLGDKFTCWYQQKPGHSPVLVIYQDTKRPSGIPERFSGSNSGNTATLTISGIQAMDEADYYCQAWDRTTVVFGGGTKLTVL

SEQ ID NO: 485 - protein, 8 aa, Artificial Sequence
  TfR 32 HCDR1
GFTFSSYA

SEQ ID NO: 486 - protein, 8 aa, Artificial Sequence
  TfR 32 HCDR2
ISAGGGST

SEQ ID NO: 487 - protein, 15 aa, Artificial Sequence
  TfR 32 HCDR3
AKREDDTTGYHYFDY

SEQ ID NO: 488 - protein, 6 aa, Artificial Sequence
  TfR 32 LCDR1
KLGDKF

SEQ ID NO: 489 - protein, 3 aa, Artificial Sequence
  TfR 32 LCDR2
QDT

SEQ ID NO: 490 - protein, 9 aa, Artificial Sequence
  TfR 32 LCDR3
QAWDRTTVV

SEQ ID NO: 491 - protein, 699 aa, Artificial Sequence
  BBBB530 HC1
QITLKESGPTLVKPTQTLTLTCTFSGFSLSTSGMGVSWIRQPPGKALEWLAHIYWDDDKRYNPSLKSRLTITKDTSKNQVVLTMTNMDPVDTATYYCARLYGFTYGFAYWGQGTLVTVSSASTKGPSVFPLAPSSKSTSGGTAALGCLVKDYFPEPVTVSWNSGALTSGVHTFPAVLQSSGLYSLSSVVTVPSSSLGTQTYICNVNHKPSNTKVDKRVEPKSCDKTHTCPPCPAPEAAGGPSVFLFPPKPKDTLMISRTPEVTCVVVSVSHEDPEVKFNWYVDGVEVHNAKTKPREEQYNSTYRVVSVLTVLHQDWLNGKEYKCKVSNKALPAPIEKTISKAKGQPREPQVYVLPPSREEMTKNQVSLLCLVKGFYPSDIAVEWESNGQPENNYLTWPPVLDSDGSFFLYSKLTVDKSRWQQGNVFSCSVMHEALHNHYTQKSLSLSPGGGSGGSEVQLLESGGGLVQPGGSLRLSCAASGFTFSSYAMSWVRQAPGKGLEWVSGISAGGGSTYYADSVKGRFTVSRGNSKNTLYLQMNSLRAEDTAVYFCAKREDDTTGYHYFDYWGQGTLVAVSSGTEGKSSGSGSESKSTSYELTQAPSVSVSPGQTASITCSGDKLGDKFTCWYQQKPGHSPVLVIYQDTKRPSGIPERFSGSNSGNTATLTISGIQAMDEADYYCQAWDRTTVVFGGGTKLTVL

SEQ ID NO: 492 - protein, 218 aa, Artificial Sequence; identical to SEQ ID NO: 11
  BBBB530 LC

SEQ ID NO: 493 - protein, 449 aa, Artificial Sequence; identical to SEQ ID NO: 12
  BBBB530 HC2

SEQ ID NO: 494 - protein, 246 aa, Artificial Sequence
  TfR 33
QVQLQESGPGLVKPSDTLSLTCAVSGYSISSSNWWGWIRQPPGKGLEWIGYIYFSGSTYFNPSLKSRVTMSVDTSKNQFSLRLSSVTAVDTAVYYCARKKGAYDYADAFDIWGQGTMVTVSSGTEGKSSGSGSESKSTSYVVTQPPSVSVAPGQTARITCGGNKIGSKSVHWFQQKPGQAPVLVVYDDSDRPSGIPERFSGSNSGNTATLTISRVEAGDEADYYCQVWDSSSDHVVFGGGTKLIVL

SEQ ID NO: 495 - protein, 10 aa, Artificial Sequence
  TfR 33 HCDR1
GYSISSSNWW

SEQ ID NO: 496 - protein, 7 aa, Artificial Sequence
  TfR 33 HCDR2
IYFSGST

SEQ ID NO: 497 - protein, 15 aa, Artificial Sequence
  TfR 33 HCDR3
ARKKGAYDYADAFDI

SEQ ID NO: 498 - protein, 6 aa, Artificial Sequence
  TfR 33 LCDR1
KIGSKS

SEQ ID NO: 499 - protein, 3 aa, Artificial Sequence
  TfR 33 LCDR2
DDS

SEQ ID NO: 500 - protein, 11 aa, Artificial Sequence
  TfR 33 LCDR3
QVWDSSSDHVV

SEQ ID NO: 501 - protein, 701 aa, Artificial Sequence
  BBBB532 HC1
QITLKESGPTLVKPTQTLTLTCTFSGFSLSTSGMGVSWIRQPPGKALEWLAHIYWDDDKRYNPSLKSRLTITKDTSKNQVVLTMTNMDPVDTATYYCARLYGFTYGFAYWGQGTLVTVSSASTKGPSVFPLAPSSKSTSGGTAALGCLVKDYFPEPVTVSWNSGALTSGVHTFPAVLQSSGLYSLSSVVTVPSSSLGTQTYICNVNHKPSNTKVDKRVEPKSCDKTHTCPPCPAPEAAGGPSVFLFPPKPKDTLMISRTPEVTCVVVSVSHEDPEVKFNWYVDGVEVHNAKTKPREEQYNSTYRVVSVLTVLHQDWLNGKEYKCKVSNKALPAPIEKTISKAKGQPREPQVYVLPPSREEMTKNQVSLLCLVKGFYPSDIAVEWESNGQPENNYLTWPPVLDSDGSFFLYSKLTVDKSRWQQGNVFSCSVMHEALHNHYTQKSLSLSPGGGSGGSQVQLQESGPGLVKPSDTLSLTCAVSGYSISSSNWWGWIRQPPGKGLEWIGYIYFSGSTYFNPSLKSRVTMSVDTSKNQFSLRLSSVTAVDTAVYYCARKKGAYDYADAFDIWGQGTMVTVSSGTEGKSSGSGSESKSTSYVVTQPPSVSVAPGQTARITCGGNKIGSKSVHWFQQKPGQAPVLVVYDDSDRPSGIPERFSGSNSGNTATLTISRVEAGDEADYYCQVWDSSSDHVVFGGGTKLIVL

SEQ ID NO: 502 - protein, 218 aa, Artificial Sequence; identical to SEQ ID NO: 11
  BBBB532 LC

SEQ ID NO: 503 - protein, 449 aa, Artificial Sequence; identical to SEQ ID NO: 12
  BBBB532 HC2

SEQ ID NO: 504 - protein, 242 aa, Artificial Sequence
  TfR 34
QLQVQESGPGLVKPSETLSLTCTVSGDSITNSNFYWGWIRQPPGKGLEWIGSIFHGGNTYYNPSLKSRVTISVDTSKNQFSLRLRSVTAADTAVYYCARYVAAPDYFDYWGQGSLVTVSSGTEGKSSGSGSESKSTSYELTQPPSVSVSPGKTASITCSGDNLGNKFACWYLQKAGQSPVLVIYQDRNRPSGIPERFSGSNSGNTATLTISGTQAMDEGDYYCQAWDSSTVVFGGGTKLTVL

SEQ ID NO: 505 - protein, 10 aa, Artificial Sequence
  TfR 34 HCDR1
GDSITNSNFY

SEQ ID NO: 506 - protein, 7 aa, Artificial Sequence
  TfR 34 HCDR2
IFHGGNT

SEQ ID NO: 507 - protein, 12 aa, Artificial Sequence
  TfR 34 HCDR3
ARYVAAPDYFDY

SEQ ID NO: 508 - protein, 6 aa, Artificial Sequence
  TfR 34 LCDR1
NLGNKF

SEQ ID NO: 509 - protein, 3 aa, Artificial Sequence
  TfR 34 LCDR2
QDR

SEQ ID NO: 510 - protein, 9 aa, Artificial Sequence
  TfR 34 LCDR3
QAWDSSTVV

SEQ ID NO: 511 - protein, 697 aa, Artificial Sequence
  BBBB538 HC1
QITLKESGPTLVKPTQTLTLTCTFSGFSLSTSGMGVSWIRQPPGKALEWLAHIYWDDDKRYNPSLKSRLTITKDTSKNQVVLTMTNMDPVDTATYYCARLYGFTYGFAYWGQGTLVTVSSASTKGPSVFPLAPSSKSTSGGTAALGCLVKDYFPEPVTVSWNSGALTSGVHTFPAVLQSSGLYSLSSVVTVPSSSLGTQTYICNVNHKPSNTKVDKRVEPKSCDKTHTCPPCPAPEAAGGPSVFLFPPKPKDTLMISRTPEVTCVVVSVSHEDPEVKFNWYVDGVEVHNAKTKPREEQYNSTYRVVSVLTVLHQDWLNGKEYKCKVSNKALPAPIEKTISKAKGQPREPQVYVLPPSREEMTKNQVSLLCLVKGFYPSDIAVEWESNGQPENNYLTWPPVLDSDGSFFLYSKLTVDKSRWQQGNVFSCSVMHEALHNHYTQKSLSLSPGGGSGGSQLQVQESGPGLVKPSETLSLTCTVSGDSITNSNFYWGWIRQPPGKGLEWIGSIFHGGNTYYNPSLKSRVTISVDTSKNQFSLRLRSVTAADTAVYYCARYVAAPDYFDYWGQGSLVTVSSGTEGKSSGSGSESKSTSYELTQPPSVSVSPGKTASITCSGDNLGNKFACWYLQKAGQSPVLVIYQDRNRPSGIPERFSGSNSGNTATLTISGTQAMDEGDYYCQAWDSSTVVFGGGTKLTVL

SEQ ID NO: 512 - protein, 218 aa, Artificial Sequence; identical to SEQ ID NO: 11
  BBBB538 LC

SEQ ID NO: 513 - protein, 449 aa, Artificial Sequence; identical to SEQ ID NO: 12
  BBBB538 HC2

SEQ ID NO: 514 - protein, 244 aa, Artificial Sequence
  TfR 35
EVQLLESGGGLVQPGGSLRLSCAASGFTFSSYVMTWARQAPGKGLEWVSTISGSGGNTYYADSVKGRFTISRDNPTNTLFLQMNSLRPEDTALYYCAKLDYDTSGYDPFDFWGQGTMVTVSSGTEGKSSGSGSESKSTSYGLTQPPSVSVSPGQTASITCSGHKLGDKFACWYQQKPGQSPVLVIYQDNKRPSGIPERFSGSNSGNTATLTISGTQAMDEADYYCQAWVSSTAIFGGGTKLTVL

SEQ ID NO: 515 - protein, 8 aa, Artificial Sequence
  TfR 35 HCDR1
GFTFSSYV

SEQ ID NO: 516 - protein, 8 aa, Artificial Sequence
  TfR 35 HCDR2
ISGSGGNT

SEQ ID NO: 517 - protein, 15 aa, Artificial Sequence
  TfR 35 HCDR3
AKLDYDTSGYDPFDF

SEQ ID NO: 518 - protein, 6 aa, Artificial Sequence
  TfR 35 LCDR1
KLGDKF

SEQ ID NO: 519 - protein, 3 aa, Artificial Sequence
  TfR 35 LCDR2
QDN

SEQ ID NO: 520 - protein, 9 aa, Artificial Sequence
  TfR 35 LCDR3
QAWVSSTAI

SEQ ID NO: 521 - protein, 699 aa, Artificial Sequence
  BBBB539 HC1
QITLKESGPTLVKPTQTLTLTCTFSGFSLSTSGMGVSWIRQPPGKALEWLAHIYWDDDKRYNPSLKSRLTITKDTSKNQVVLTMTNMDPVDTATYYCARLYGFTYGFAYWGQGTLVTVSSASTKGPSVFPLAPSSKSTSGGTAALGCLVKDYFPEPVTVSWNSGALTSGVHTFPAVLQSSGLYSLSSVVTVPSSSLGTQTYICNVNHKPSNTKVDKRVEPKSCDKTHTCPPCPAPEAAGGPSVFLFPPKPKDTLMISRTPEVTCVVVSVSHEDPEVKFNWYVDGVEVHNAKTKPREEQYNSTYRVVSVLTVLHQDWLNGKEYKCKVSNKALPAPIEKTISKAKGQPREPQVYVLPPSREEMTKNQVSLLCLVKGFYPSDIAVEWESNGQPENNYLTWPPVLDSDGSFFLYSKLTVDKSRWQQGNVFSCSVMHEALHNHYTQKSLSLSPGGGSGGSEVQLLESGGGLVQPGGSLRLSCAASGFTFSSYVMTWARQAPGKGLEWVSTISGSGGNTYYADSVKGRFTISRDNPTNTLFLQMNSLRPEDTALYYCAKLDYDTSGYDPFDFWGQGTMVTVSSGTEGKSSGSGSESKSTSYGLTQPPSVSVSPGQTASITCSGHKLGDKFACWYQQKPGQSPVLVIYQDNKRPSGIPERFSGSNSGNTATLTISGTQAMDEADYYCQAWVSSTAIFGGGTKLTVL

SEQ ID NO: 522 - protein, 218 aa, Artificial Sequence; identical to SEQ ID NO: 11
  BBBB539 LC

SEQ ID NO: 523 - protein, 449 aa, Artificial Sequence; identical to SEQ ID NO: 12
  BBBB539 HC2

SEQ ID NO: 524 - protein, 246 aa, Artificial Sequence
  TfR 36
QVQLVESGGGVVQPGRSLRLSCAASGFTFSSDGMHWVRQAPGKGLEWVAVIWYDGSNKYYADSVKGRFTISRDNSKNTLYLQMNSLRAEDTAVYYCARDRQWLAFDYWGQGTLVTVSSGTEGKSSGSGSESKSTQSALTQPPSASGSPGQSVTISCSGTSSDVGGYNFVSWYQQHPGKAPKLMISEVSKRPSGVPDRFSGSKSGNTASLTVSGLQAEDEADYYCSSYTDSNNFDVLFGGGTKLTVL

SEQ ID NO: 525 - protein, 8 aa, Artificial Sequence
  TfR 36 HCDR1
GFTFSSDG

SEQ ID NO: 526 - protein, 8 aa, Artificial Sequence
  TfR 36 HCDR2
IWYDGSNK

SEQ ID NO: 527 - protein, 11 aa, Artificial Sequence
  TfR 36 HCDR3
ARDRQWLAFDY

SEQ ID NO: 528 - protein, 9 aa, Artificial Sequence
  TfR 36 LCDR1
SSDVGGYNF

SEQ ID NO: 529 - protein, 3 aa, Artificial Sequence
  TfR 36 LCDR2
EVS

SEQ ID NO: 530 - protein, 12 aa, Artificial Sequence
  TfR 36 LCDR3
SSYTDSNNFDVL

SEQ ID NO: 531 - protein, 701 aa, Artificial Sequence
  BBBB540 HC1
QITLKESGPTLVKPTQTLTLTCTFSGFSLSTSGMGVSWIRQPPGKALEWLAHIYWDDDKRYNPSLKSRLTITKDTSKNQVVLTMTNMDPVDTATYYCARLYGFTYGFAYWGQGTLVTVSSASTKGPSVFPLAPSSKSTSGGTAALGCLVKDYFPEPVTVSWNSGALTSGVHTFPAVLQSSGLYSLSSVVTVPSSSLGTQTYICNVNHKPSNTKVDKRVEPKSCDKTHTCPPCPAPEAAGGPSVFLFPPKPKDTLMISRTPEVTCVVVSVSHEDPEVKFNWYVDGVEVHNAKTKPREEQYNSTYRVVSVLTVLHQDWLNGKEYKCKVSNKALPAPIEKTISKAKGQPREPQVYVLPPSREEMTKNQVSLLCLVKGFYPSDIAVEWESNGQPENNYLTWPPVLDSDGSFFLYSKLTVDKSRWQQGNVFSCSVMHEALHNHYTQKSLSLSPGGGSGGSQVQLVESGGGVVQPGRSLRLSCAASGFTFSSDGMHWVRQAPGKGLEWVAVIWYDGSNKYYADSVKGRFTISRDNSKNTLYLQMNSLRAEDTAVYYCARDRQWLAFDYWGQGTLVTVSSGTEGKSSGSGSESKSTQSALTQPPSASGSPGQSVTISCSGTSSDVGGYNFVSWYQQHPGKAPKLMISEVSKRPSGVPDRFSGSKSGNTASLTVSGLQAEDEADYYCSSYTDSNNFDVLFGGGTKLTVL

SEQ ID NO: 532 - protein, 218 aa, Artificial Sequence; identical to SEQ ID NO: 11
  BBBB540 LC

SEQ ID NO: 533 - protein, 449 aa, Artificial Sequence; identical to SEQ ID NO: 12
  BBBB540 HC2

SEQ ID NO: 534 - protein, 244 aa, Artificial Sequence
  TfR 37
QVQLVQSGAEVKKPGASVKVSCKASGYTFTSYDIHWVRQATGQGLEWMGWMNPNSGDTGYAQKFQGRVSMTRDTSMSTAYMELSRLRSGDTAVYYCMKMYYDTTGYHSFDSWGQGTLVTVSSGTEGKSSGSGSESKSTSYDLTQPPSVSVSPGQTANITCSGDRLGDRFGCWYQQKPGQSPVLVIYQDTKRPSGIPERFSGSNSGNTATLTISGTQAMDEADYYCQTWVATTVVFGGGTKLTVL

SEQ ID NO: 535 - protein, 8 aa, Artificial Sequence
  TfR 37 HCDR1
GYTFTSYD

SEQ ID NO: 536 - protein, 8 aa, Artificial Sequence
  TfR 37 HCDR2
MNPNSGDT

SEQ ID NO: 537 - protein, 15 aa, Artificial Sequence
  TfR 37 HCDR3
MKMYYDTTGYHSFDS

SEQ ID NO: 538 - protein, 6 aa, Artificial Sequence
  TfR 37 LCDR1
RLGDRF

SEQ ID NO: 539 - protein, 3 aa, Artificial Sequence
  TfR 37 LCDR2
QDT

SEQ ID NO: 540 - protein, 9 aa, Artificial Sequence
  TfR 37 LCDR3
QTWVATTVV

SEQ ID NO: 541 - protein, 699 aa, Artificial Sequence
  BBBB546 HC1
QITLKESGPTLVKPTQTLTLTCTFSGFSLSTSGMGVSWIRQPPGKALEWLAHIYWDDDKRYNPSLKSRLTITKDTSKNQVVLTMTNMDPVDTATYYCARLYGFTYGFAYWGQGTLVTVSSASTKGPSVFPLAPSSKSTSGGTAALGCLVKDYFPEPVTVSWNSGALTSGVHTFPAVLQSSGLYSLSSVVTVPSSSLGTQTYICNVNHKPSNTKVDKRVEPKSCDKTHTCPPCPAPEAAGGPSVFLFPPKPKDTLMISRTPEVTCVVVSVSHEDPEVKFNWYVDGVEVHNAKTKPREEQYNSTYRVVSVLTVLHQDWLNGKEYKCKVSNKALPAPIEKTISKAKGQPREPQVYVLPPSREEMTKNQVSLLCLVKGFYPSDIAVEWESNGQPENNYLTWPPVLDSDGSFFLYSKLTVDKSRWQQGNVFSCSVMHEALHNHYTQKSLSLSPGGGSGGSQVQLVQSGAEVKKPGASVKVSCKASGYTFTSYDIHWVRQATGQGLEWMGWMNPNSGDTGYAQKFQGRVSMTRDTSMSTAYMELSRLRSGDTAVYYCMKMYYDTTGYHSFDSWGQGTLVTVSSGTEGKSSGSGSESKSTSYDLTQPPSVSVSPGQTANITCSGDRLGDRFGCWYQQKPGQSPVLVIYQDTKRPSGIPERFSGSNSGNTATLTISGTQAMDEADYYCQTWVATTVVFGGGTKLTVL

SEQ ID NO: 542 - protein, 218 aa, Artificial Sequence; identical to SEQ ID NO: 11
  BBBB546 LC

SEQ ID NO: 543 - protein, 449 aa, Artificial Sequence; identical to SEQ ID NO: 12
  BBBB546 HC2

SEQ ID NO: 544 - protein, 242 aa, Artificial Sequence
  TfR 38
QLQVQESGPGLVKPSETLSLTCTVSGGSISNSNYYWGLIRQPPGKGLEWIGSIFHGGNTYYNPSLKSRVTISVDTSKNQFSLRLRSVTAADTAVYYCARYVAAPDYFDYWGQGTLVTVSSGTEGKSSGSGSESKSTSYELTQPPSVSVSPGKTASITCSGDKLGDKFACWYQQKAGQSPVLVIYQDRKRPSGIPERFSGSNSGNTATLTISGTQTMDEGDYYCQAWDSSTVVFGGGTKLTVL

SEQ ID NO: 545 - protein, 10 aa, Artificial Sequence
  TfR 38 HCDR1
GGSISNSNYY

SEQ ID NO: 546 - protein, 7 aa, Artificial Sequence
  TfR 38 HCDR2
IFHGGNT

SEQ ID NO: 547 - protein, 12 aa, Artificial Sequence
  TfR 38 HCDR3
ARYVAAPDYFDY

SEQ ID NO: 548 - protein, 6 aa, Artificial Sequence
  TfR 38 LCDR1
KLGDKF

SEQ ID NO: 549 - protein, 3 aa, Artificial Sequence
  TfR 38 LCDR2
QDR

SEQ ID NO: 550 - protein, 9 aa, Artificial Sequence
  TfR 38 LCDR3
QAWDSSTVV

SEQ ID NO: 551 - protein, 697 aa, Artificial Sequence
  BBBB547 HC1
QITLKESGPTLVKPTQTLTLTCTFSGFSLSTSGMGVSWIRQPPGKALEWLAHIYWDDDKRYNPSLKSRLTITKDTSKNQVVLTMTNMDPVDTATYYCARLYGFTYGFAYWGQGTLVTVSSASTKGPSVFPLAPSSKSTSGGTAALGCLVKDYFPEPVTVSWNSGALTSGVHTFPAVLQSSGLYSLSSVVTVPSSSLGTQTYICNVNHKPSNTKVDKRVEPKSCDKTHTCPPCPAPEAAGGPSVFLFPPKPKDTLMISRTPEVTCVVVSVSHEDPEVKFNWYVDGVEVHNAKTKPREEQYNSTYRVVSVLTVLHQDWLNGKEYKCKVSNKALPAPIEKTISKAKGQPREPQVYVLPPSREEMTKNQVSLLCLVKGFYPSDIAVEWESNGQPENNYLTWPPVLDSDGSFFLYSKLTVDKSRWQQGNVFSCSVMHEALHNHYTQKSLSLSPGGGSGGSQLQVQESGPGLVKPSETLSLTCTVSGGSISNSNYYWGLIRQPPGKGLEWIGSIFHGGNTYYNPSLKSRVTISVDTSKNQFSLRLRSVTAADTAVYYCARYVAAPDYFDYWGQGTLVTVSSGTEGKSSGSGSESKSTSYELTQPPSVSVSPGKTASITCSGDKLGDKFACWYQQKAGQSPVLVIYQDRKRPSGIPERFSGSNSGNTATLTISGTQTMDEGDYYCQAWDSSTVVFGGGTKLTVL

SEQ ID NO: 552 - protein, 218 aa, Artificial Sequence; identical to SEQ ID NO: 11
  BBBB547 LC

SEQ ID NO: 553 - protein, 449 aa, Artificial Sequence; identical to SEQ ID NO: 12
  BBBB547 HC2

SEQ ID NO: 554 - protein, 10 aa, Artificial Sequence
  PT1B844 HCDR1
GFTFSSYAMS

SEQ ID NO: 555 - protein, 9 aa, Artificial Sequence
  PT1B844 HCDR2
SISKGGNTY

SEQ ID NO: 556 - protein, 10 aa, Artificial Sequence
  PT1B844 HCDR3
GWGDYGWFAY

SEQ ID NO: 557 - protein, 11 aa, Artificial Sequence
  PT1B844 LCDR1
KASQDINRYLN

SEQ ID NO: 558 - protein, 7 aa, Artificial Sequence
  PT1B844 LCDR2
RANRLLD

SEQ ID NO: 559 - protein, 9 aa, Artificial Sequence
  PT1B844 LCDR3
QQYDEFPLT

We claim:

1. An anti-TfR antibody or antigen-binding fragment thereof for delivering an agent to the brain of a subject in need thereof, wherein the anti-TfR antibody or antigen-binding fragment thereof binds to a transferrin receptor (TfR), preferably human TfR1, with a dissociation constant K_{D} of at least 1 nM, preferably 1-500 nM, at neutral pH and an off-rate constant k_{d} of at least 10⁻⁴ sec⁻¹, preferably 10⁻⁴ to 10⁻¹ sec⁻¹, at an acidic pH, preferably pH 5.

2. The anti-TfR antibody or antigen-binding fragment thereof of claim 1, having an off-rate constant k_{d} of 2×10⁻², to 2×10⁻⁴ sec⁻¹, preferably 2.0×10⁻³ sec⁻¹ at the neutral pH.

3. The anti-TfR antibody or antigen-binding fragment thereof of claim 1 or 2, comprising:
(1) a heavy chain variable region comprising heavy chain complementarity determining regions (HCDRs) HCDR1, HCDR2 and HCDR3, and a light chain variable region comprising light chain complementarity determining regions (LCDRs) LCDR1, LCDR2 and LCDR3, wherein the HCDR1, HCDR2, HCDR3, LCDR1, LCDR2 and LCDR3 have the amino acid sequences of:
(i) SEQ ID NOs: 292, 293, 294, 295, 296, and 297, respectively;
(ii) SEQ ID NOs: 279, 280, 281, 282, 283 and 284, respectively;
(iii) SEQ ID NOs: 29, 30, 31, 32, 33 and 34, respectively;
(iv) SEQ ID NOs: 57, 58, 59, 60, 61 and 62, respectively;
(v) SEQ ID NOs: 85, 86, 87, 88, 89 and 90, respectively;
(vi) SEQ ID NOs: 110, 111, 112, 113, 114 and 115, respectively;
(vii) SEQ ID NOs: 135, 136, 137, 138, 139 and 140, respectively;
(viii) SEQ ID NOs: 191, 192, 193, 194, 195 and 196, respectively;
(ix) SEQ ID NOs: 244, 245, 246, 247, 248 and 249, respectively;
(x) SEQ ID NOs: 263, 264, 265, 266, 267 and 268, respectively;
(xi) SEQ ID NOs: 345, 346, 347, 348, 349 and 350, respectively;
(xii) SEQ ID NOs: 355, 356, 357, 358, 359 and 360, respectively;
(xiii) SEQ ID NOs: 365, 366, 367, 368, 369 and 370, respectively;
(xiv) SEQ ID NOs: 375, 376, 377, 378, 379 and 380, respectively;
(xv) SEQ ID NOs: 385, 386, 387, 388, 389 and 390, respectively;
(xvi) SEQ ID NOs: 395, 396, 377, 398, 399 and 400, respectively;
(xvii) SEQ ID NOs: 405, 406, 407, 408, 409 and 410, respectively;
(xviii) SEQ ID NOs: 415, 416, 417, 418, 419 and 420, respectively;
(xix) SEQ ID NOs: 425, 426, 427, 428, 429 and 430, respectively;
(xx) SEQ ID NOs: 435, 436, 437, 438, 439 and 440, respectively;
(xxi) SEQ ID NOs: 445, 446, 447, 448, 449 and 450, respectively;
(xxii) SEQ ID NOs: 455, 456, 457, 458, 459 and 460, respectively;
(xxiii) SEQ ID NOs: 465, 466, 467, 468, 469 and 470, respectively;
(xxiv) SEQ ID NOs: 475, 476, 477, 478, 479 and 480, respectively;
(xxv) SEQ ID NOs: 485, 486, 487, 488, 489 and 490, respectively;
(xxvi) SEQ ID NOs: 495, 496, 497, 498, 499 and 500, respectively;
(xxvii) SEQ ID NOs: 505, 506, 507, 508, 509 and 510, respectively;
(xxviii) SEQ ID NOs: 515, 516, 517, 518, 519 and 520, respectively;
(xxix) SEQ ID NOs: 525, 526, 527, 528, 529 and 530, respectively;
(xxx) SEQ ID NOs: 535, 536, 537, 538, 539 and 540, respectively; or
(xxxi) SEQ ID NOs: 545, 546, 547, 548, 549 and 550, respectively; or
(2) a single variable domain on a heavy chain (VHH) comprising heavy chain complementarity determining regions (HCDRs) HCDR1, HCDR2 and HCDR3 having the amino acid sequences of:
(i) SEQ ID NOs: 7, 8 and 9, respectively;
(ii) SEQ ID NOs: 317, 318 and 319, respectively;
(iii) SEQ ID NOs: 324, 325 and 326, respectively;
(iv) SEQ ID NOs: 331, 332 and 333, respectively; or
(v) SEQ ID NOs: 338, 339 and 340, respectively.

4. The anti-TfR antibody or antigen-binding fragment thereof of any one of claims 1-3, being a VHH fragment comprising an amino acid sequence having at least 80%, such as at least 85%, 90%, 95% or 100%, sequence identity to SEQ ID NO: 6, 316, 323, 330, or 337.

5. The anti-TfR antibody or antigen-binding fragment thereof of any one of claims 1-3, being single-chain variable fragment (scFv) comprising the heavy chain variable region covalently linked to the light chain variable region via a linker, preferably, the linker has the amino acid sequence of SEQ ID NO: 314, more preferably, the scFv comprises an amino acid sequence having at least 80%, such as at least 85%, 90%, 95% or 100%, sequence identity to the amino acid sequences of SEQ ID NO: 278, 291, 28, 56, 84, 109, 134, 162, 190, 218, 243, 262, 344, 354, 364, 374, 384, 394, 404, 414, 424, 434, 444, 454, 464, 474, 484, 494, 504, 514, 524, 534 or 544.

6. A conjugate comprising the anti-TfR antibody or antigen-binding fragment thereof of any one of claims 1-5 coupled to a therapeutic or diagnostic agent, preferably, the conjugate is a multi-specific antibody comprising a first antigen binding region which binds the TfR and comprises the antigen-binding fragment of any one of claims 1 to 5, and a second antigen binding region which binds a brain target, such as a brain target selected from the group consisting of beta-secretase 1 (BACE1), amyloid beta (Abeta), epidermal growth factor receptor (EGFR), human epidermal growth factor receptor 2 (HER2), Tau, apolipoprotein E4 (ApoE4), alpha-synuclein, CD20, huntingtin, prion protein (PrP), leucine rich repeat kinase 2 (LRRK2), parkin, presenilin 1, presenilin 2, gamma secretase, death receptor 6 (DR6), amyloid precursor protein (APP), p75 neurotrophin receptor (p75NTR), and caspase 6.

7. A fusion construct comprising the anti-TfR antibody or antigen-binding fragment thereof of any one of claims 1 to 5 covalently linked to a second antibody or an antigen binding fragment thereof that binds to a brain target, such as a brain target selected from the group consisting of beta-secretase 1 (BACE 1), amyloid beta (Abeta), epidermal growth factor receptor (EGFR), human epidermal growth factor receptor 2 (HER2), Tau, apolipoprotein E4 (ApoE4), alpha-synuclein, CD20, huntingtin, prion protein (PrP), leucine rich repeat kinase 2 (LRRK2), parkin, presenilin 1, presenilin 2, gamma secretase, death receptor 6 (DR6), amyloid precursor protein (APP), p75 neurotrophin receptor (p75NTR), and caspase 6.

8. The fusion construct of claim 7, wherein the anti-TfR antibody or antigen-binding fragment thereof is covalently linked to the carboxy terminus of only one of the two heavy chains of the second antibody or antigen binding fragment thereof via a linker, preferably the linker has the amino acid sequence of SEQ ID NO: 312 or SEQ ID NO: 313.

9. The fusion construct of claim 8, wherein each of the two heavy chains of the second antibody or antigen binding fragment thereof comprises one or more heterodimeric mutations, such as a modified heterodimeric CH3 domain, or one or more knob and hole mutations, as compared to a wild-type CH3 domain polypeptide.

10. The fusion construct of claim 9, wherein the heterodimeric mutations comprise the modified heterodimeric CH3 domain of the first heavy chain comprises amino acid modifications at positions T350, L351, F405, and Y407, and the modified heterodimeric CH3 domain of the second heavy chain comprises amino acid modifications at positions T350, T366, K392 and T394, wherein the amino acid modification at position T350 is T350V, T350I, T350L or T350M; the amino acid modification at position L351 is L351Y; the amino acid modification at position F405 is F405A, F405V, F405T or F405S; the amino acid modification at position Y407 is Y407V, Y407A or Y407I; the amino acid modification at position T366 is T366L, T366I, T366V or T366M, the amino acid modification at position K392 is K392F, K392L or K392M, and the amino acid modification at position T394 is T394W, and wherein the numbering of amino acid residues is according to the EU index as set forth in Kabat.

11. The fusion construct of claim 10, wherein the modified heterodimeric CH3 domain of the first heavy chain comprises mutations T350V, L351Y, F405A and Y407V, and the modified heterodimeric CH3 domain of the second heavy chain comprises mutations T350V, T366L, K392L and T394W.

12. The fusion of any one of claims 7-11, wherein the second antibody or antigen binding fragment thereof comprises one or more mutations in the Fc domain that enhance binding of the fusion to the neonatal Fc receptor (RcRn), preferably the one or more mutations enhance the binding at an acidic pH, more preferably the Fc has the M252Y/S254T/T256E (YTE) mutations, wherein the numbering of amino acid residues is according to the EU index as set forth in Kabat.

13. The fusion of any one of claims 7-12, wherein the second antibody or antigen binding fragment thereof comprises one or more mutations in the Fc domain that reduce or eliminate the effector function, preferably the Fc has one or more amino acid modifications at positions L234, L235, D270, N297, E318, K320, K322, P331, and P329, such as one, two or three mutations of L234A, L235A and P331S, wherein the numbering of amino acid residues is according to the EU index as set forth in Kabat.

14. The fusion construct of any one of claims 7-13, wherein the second antibody or antigen binding fragment thereof binds to Tau and comprises HCDR1, HCDR2, HCDR3, LCDR1, LCDR2 and LCDR3 having the amino acid sequences of SEQ ID NOs: 554 to 559, respectively, preferably, the second antibody is a monoclonal antibody comprising a heavy chain having the amino acid sequence of SEQ ID NO: 310 and a light chain having the amino acid sequence of SEQ ID NO: 311.

15. The fusion construct of any one of claims 7-14, comprising:
(1) a first heavy chain having an amino acid sequence that is at least 80%, such as at least 85%, 90%, 95% or 100%, identical to an amino acid sequence selected from the group consisting of SEQ ID NOs: 301, 304, 307, 285, 288, 298, 10, 13, 16, 19, 22, 25, 35, 38, 41, 44, 47, 50, 53, 63, 66, 69, 72, 75, 78, 81, 91, 94, 97, 100, 103, 106, 116, 119, 122, 125, 128, 131, 141, 144, 147, 150, 153, 156, 159, 169, 172, 175, 178, 181, 184, 187, 197, 200, 203, 206, 209, 212, 215, 225, 228, 231, 234, 237, 240, 250, 252, 256, 259, 269, 272, 275, 320, 327, 334, 341, 351, 361, 371, 381, 391, 401, 411, 421, 431, 441, 451, 461 and 471;
(2) two light chains each independently having an amino acid sequence that is at least 80%, such as at least 85%, 90%, 95% or 100%, identical to an amino acid sequence selected from the group consisting of 302, 305, 308, 286, 289, 299, 11, 14, 17, 20, 23, 26, 36, 39, 42, 45, 48, 51, 54, 64, 67, 70, 73, 76, 79, 82, 92, 95, 98, 101, 104, 107, 117, 120, 123, 126, 129, 132, 142, 145, 148, 151, 154, 157, 160, 170, 173, 176, 179, 182, 185, 188, 198, 201, 204, 207, 210, 213, 216, 226, 229, 232, 235, 238, 241, 251, 253, 257, 260, 270, 273 276, 321, 328, 335, 342, 352, 362, 372, 382, 392, 402, 412, 422, 432, 442, 452, 462 and 472, respectively; and
(3) a second heavy chain having an amino acid sequence that is at least 80%, such as at least 85%, 90%, 95% or 100%, identical to an amino acid sequence selected from the group consisting of 303, 306, 309, 287, 290, 300, 12, 15, 18, 21, 24, 27, 37, 40, 43, 46, 49, 52, 55, 65, 68, 71, 74, 77, 80, 83, 93, 96, 99, 102, 105, 108, 118, 121, 124, 127, 130, 133, 143, 146, 149, 152, 155, 158, 161, 171, 174, 177, 180, 183, 186, 189, 199, 202, 205, 208, 211, 214, 217, 227, 230, 233, 236, 239, 242, 252, 254, 258, 261, 271, 274, 277, 322, 329, 336, 343, 353, 363, 373, 383, 393, 403, 413, 423, 433, 443, 453, 463 and 473, respectively.

16. An isolated nucleic acid encoding the antibody or antigen-binding fragment of any one of claims 1-5, the conjugate of claim 6 or the fusion construct of any one of claims 7-15.

17. A vector comprising the isolated nucleic acid of claim 16.

18. A host cell comprising the nucleic acid of claim 16 or the vector of claim 17.

19. A method of producing the antibody or antigen-binding fragment of any one of claims 1-5, the conjugate of claim 6, or the fusion construct of any one of claims 7-15, comprising culturing a cell comprising a nucleic acid encoding the antibody or antigen-binding fragment, the conjugate or the fusion construct under conditions to produce the antibody or antigen-binding fragment, the conjugate or the fusion construct, and recovering the antibody or antigen-binding fragment, the conjugate or the fusion construct from the cell or cell culture.

20. A pharmaceutical composition comprising the antibody or antigen-binding fragment of any one of claims 1-5, the conjugate of claim 6, or the fusion construct of any one of claims 7-15, and a pharmaceutically acceptable carrier.

21. A method of treating or detecting a disorder, preferably a neurological disorder, in a subject in need thereof, comprising administering to the subject the antibody or antigen-binding fragment of any one of claims 1-5, the conjugate of claim 6, or the fusion construct of any one of claims 7-15, or the pharmaceutical composition of claim 20, preferably, the neurological disorder is selected from the group consisting of neurodegenerative diseases (such as Lewy body disease, postpoliomyelitis syndrome, Shy-Draeger syndrome, olivopontocerebellar atrophy, Parkinson's disease, multiple system atrophy, striatonigral degeneration, spinocerebellar ataxia, spinal muscular atrophy), tauopathies (such as Alzheimer disease and supranuclear palsy), prion diseases (such as bovine spongiform encephalopathy, scrapie, Creutz-feldt-Jakob syndrome, kuru, Gerstmann-Straussler-Scheinker disease, chronic wasting disease, and fatal familial insomnia), bulbar palsy, motor neuron disease, and nervous system heterodegenerative disorders (such as Canavan disease, Huntington's disease, neuronal ceroid-lipofuscinosis, Alexander's disease, Tourette's syndrome, Menkes kinky hair syndrome, Cockayne syndrome, Halervorden-Spatz syndrome, lafora disease, Rett syndrome, hepatolenticular degeneration, Lesch-Nyhan syndrome, and Unverricht-Lundborg syndrome), dementia (such as Pick's disease, and spinocerebellar ataxia), and cancer of the CNS and/or brain (such as brain metastases resulting from cancer elsewhere in the body).

22. The method of claim 21, wherein the antibody or antigen-binding fragment thereof, the conjugate, or the pharmaceutical composition is administered intravenously.

23. A method of delivering a therapeutic or diagnostic agent across the blood-brain barrier (BBB) of a subject in need thereof, comprising administering to the subject a complex comprising the therapeutic or diagnostic agent coupled to, preferably covalently conjugated to, the antibody or antigen-binding fragment thereof of any one of claims 1 to 5.

24. The method of any one of claims 21 to 24, wherein the administration reduces Fc-mediated effector function and/or does not induce rapid reticulocyte depletion.

25. A method of inducing antibody dependent phagocytosis (ADP) without stimulating secretion of a pro-inflammatory cytokine in a subject in need thereof, comprising administering to the subject a complex comprising a therapeutic antibody or antigen binding fragment thereof coupled to, preferably covalently conjugated to, the antigen-binding fragment thereof of any one of claims 1 to 5, wherein the therapeutic antibody or antigen binding fragment thereof comprises one or more amino acid modifications at positions L234, L235, D270, N297, E318, K320, K322, P331, and P329, such as one, two or three mutations of L234A, L235A and P331S, wherein the numbering of amino acid residues is according to the EU index as set forth in Kabat.

26. The method of claim 25, wherein the therapeutic antibody or antigen binding fragment thereof binds specifically to tau aggregates.
